(19) United States
(12) Patent Application Publication
(10) Pub. No.: US 2024/0287484 A1
(43) Pub. Date: Aug. 29, 2024

(54) SYSTEMS, COMPOSITIONS, AND METHODS INVOLVING RETROTRANSPOSONS AND FUNCTIONAL FRAGMENTS THEREOF

(71) Applicant: Metagenomi, Inc., Emeryville, CA (US)

(72) Inventors: Brian C. THOMAS, Berkeley, CA (US); Christopher BROWN, Albany, CA (US); Daniela S.A. GOLTSMAN, Oakland, CA (US); Sarah LAPERRIERE, Berkeley, CA (US); Cindy CASTELLE, San Francisco, CA (US); Lisa ALEXANDER, Albany, CA (US); Mary Kaitlyn Chiu, San Francisco, CA (US); Morayma TEMOCHE-DIAZ, Oakland, CA (US); Anu THOMAS, Albany, CA (US)

(21) Appl. No.: 18/598,627

(22) Filed: Mar. 7, 2024

Related U.S. Application Data
(63) Continuation of application No. PCT/US2022/076061, filed on Sep. 7, 2022.
(60) Provisional application No. 63/241,943, filed on Sep. 8, 2021.

(51) Int. Cl. C12N 9/12; C12N 9/22; C12N 15/10

(52) U.S. Cl. CPC C12N 9/1276; C12N 9/22; C12N 15/1096; C12Y 207/07049

(57) ABSTRACT

The present disclosure provides systems and methods for transposing a cargo nucleotide sequence to a target nucleic acid site. These systems and methods can comprise a nucleic acid comprising the cargo nucleotide sequence, wherein the cargo nucleotide sequence is configured to interact with a retrotransposase, and the retrotransposase, wherein said retrotransposase is configured to transpose the cargo nucleotide sequence to the target nucleic acid site. The systems and methods can also involve use of functional fragments of retrotransposases.

### CROSS-REFERENCE

[0001] This application is a continuation of International Application No. PCT/US2022/076061, entitled “SYSTEMS, COMPOSITIONS, AND METHODS INVOLVING RETROTRANSPOSONS AND FUNCTIONAL FRAGMENTS THEREOF”, filed on Sep. 7, 2022, which claims the benefit of U.S. Provisional Application No. 63/241,943, entitled “SYSTEMS AND METHODS FOR TRANSPOSING CARGO NUCLEOTIDE SEQUENCES”, filed on Sep. 8, 2021, which is incorporated by reference herein in its entirety.

### BACKGROUND

[0002] Transposable elements are movable DNA sequences which play a crucial role in gene function and evolution. While transposable elements are found in nearly all forms of life, their prevalence varies among organisms, with a large proportion of the eukaryotic genome encoding for transposable elements (at least 45% in humans).

### SEQUENCE LISTING

[0003] The instant application contains a Sequence Listing which has been submitted electronically in XML format and is hereby incorporated by reference in its entirety. Said XML copy, created on May 13, 2024, is named 55921-734301.xml and is 1,700,073 bytes in size.

### SUMMARY

[0004] While the foundational research on transposable elements was conducted in the 1940s, their potential utility in DNA manipulation and gene editing applications has only been recognized in recent years.

[0005] In some aspects, the present disclosure provides for an engineered retrotransposase system, comprising: (a) an RNA comprising a heterologous engineered cargo nucleotide sequence, wherein the cargo nucleotide sequence is configured to interact with a retrotransposase; and (b) a retrotransposase, wherein: (i) the retrotransposase is configured to transpose the cargo nucleotide sequence to a target nucleic acid locus; and (ii) the retrotransposase comprises a reverse transcriptase (RT) domain, an endonuclease domain comprising a sequence having at least about 80%, at least about 81%, at least about 82%, at least about 83%, at least about 84%, at least about 85%, at least about 86%, at least about 87%, at least about 88%, at least about 89%, at least about 90%, at least about 91%, at least about 92%, at least about 93%, at least about 94%, at least about 95%, at least about 96%, at least about 97%, at least about 98%, at least about 99%, or 100% sequence identity to an RT or endonuclease domain of any one of SEQ ID NOs: 1-29 or 393-401, or a variant thereof. In some embodiments, the retrotransposase further comprises any of the Zn-binding ribbon motifs of any one of SEQ ID NOs: 1-29 or 393-401, or a variant thereof. In some embodiments, the retrotransposase further comprises a sequence having at least 80% sequence identity to any one of SEQ ID NOs: 1-29 or 393-401, or a variant thereof. In some embodiments, wherein the retrotransposase further comprises a conserved catalytic D, QG, [Y/F]XDD, or LG motif relative to any of the sequences in FIG. 2A. In some embodiments, the retrotransposase further comprises a conserved CX_{[2-3]}C Zn finger motif relative to any of the sequences in FIG. 2B. In some embodiments, the retrotransposase comprises a sequence having at least 80% sequence identity to any one of SEQ ID NOs: 3, 6, 7, 8, 14, or 402, or a variant thereof. In some embodiments, the system further comprises: (c) a double-stranded DNA sequence comprising the target nucleic acid locus. In some embodiments, the double-stranded DNA sequence comprises a 5′ recognition sequence and a 3′ recognition sequence configured to interact with the retrotransposase, wherein the 5′ recognition sequence comprises a GG nucleotide sequence and the 3′ recognition sequence comprises a TGAC nucleotide sequence. In some embodiments, the RNA is an in vitro transcribed RNA. In some embodiments, the RNA comprises a sequence 5′ to the cargo sequence or a sequence 3′ to the cargo sequence that has at least about 80%, at least about 81%, at least about 82%, at least about 83%, at least about 84%, at least about 85%, at least about 86%, at least about 87%, at least about 88%, at least about 89%, at least about 90%, at least about 91%, at least about 92%, at least about 93%, at least about 94%, at least about 95%, at least about 96%, at least about 97%, at least about 98%, at least about 99%, or 100% sequence identity to an RNA cognate of any one of SEQ ID NOs: 761-798, a complement thereof, or a reverse complement thereof. In some embodiments, the RNA comprises a sequence encoding the retrotransposase. In some embodiments, the heterologous engineered cargo nucleotide sequence comprises an expression cassette.

[0006] In some embodiments, the present disclosure provides for an engineered DNA sequence, comprising: (a) a 5′ sequence capable of encoding an RNA sequence configured to interact with a retrotransposase; (b) a heterologous cargo sequence; (c) a sequence encoding a retrotransposase configured to interact with an RNA cognate of the 5′ sequence, wherein the retrotransposase comprises a reverse transcriptase (RT) domain or an endonuclease domain comprising a sequence having at least about 80%, at least about 81%, at least about 82%, at least about 83%, at least about 84%, at least about 85%, at least about 86%, at least about 87%, at least about 88%, at least about 89%, at least about 90%, at least about 91%, at least about 92%, at least about 93%, at least about 94%, at least about 95%, at least about 96%, at least about 97%, at least about 98%, at least about 99%, or 100% sequence identity to a RT or endonuclease domain of any one of SEQ ID NOs: 1-29 or 393-401, or a variant thereof; and (d) a 3′ sequence capable of encoding an RNA sequence configured to interact with the retrotransposase. In some embodiments, the retrotransposase further comprises any of the Zn-binding ribbon motifs of any one of SEQ ID NOs: 1-29 or 393-401, or a variant thereof. In some embodiments, the retrotransposase further comprises a sequence having at least 80% sequence identity to any one of SEQ ID NOs: 1-29 or 393-401, or a variant thereof. In some embodiments, the retrotransposase further comprises a conserved catalytic D, QG, [Y/F]XDD or LG motif relative to any of the sequences in FIG. 2A. In some embodiments, the retrotransposase further comprises a conserved CX_{[2-3]}C Zn finger motif relative to any of the sequences in FIG. 2B. In some embodiments, the retrotransposase comprises a sequence having at least 80% sequence identity to any one of SEQ ID NOs: 3, 6, 7, 8, 14, or 402, or a variant thereof. In some embodiments, the 5′ sequence or the 3′ sequence comprises a sequence having at least about 80%, at least about 81%, at least about 82%, at least about 83%, at least about 84%, at least about 85%, at least about 86%, at least about 87%, at least about 88%, at least about 89%, at least about 90%, at least about 91%, at least about 92%, at least about 93%, at least about 94%, at least about 95%, at least about 96%, at least about 97%, at least about 98%, at least about 99%, or 100% sequence identity to an RNA cognate of any one of SEQ ID NOs: 761-798, a complement thereof, or a reverse complement thereof.

[0007] In some aspects, the present disclosure provides for a method for synthesizing complementary DNA (cDNA), comprising: (a) providing an RNA molecule as a template for cDNA synthesis, (b) providing a primer oligonucleotide to initiate cDNA synthesis from the RNA molecule; and (c) synthesizing cDNA initiated by the primer oligonucleotide from the template using a reverse transcriptase comprising a sequence having at least about 80%, at least about 81%, at least about 82%, at least about 83%, at least about 84%, at least about 85%, at least about 86%, at least about 87%, at least about 88%, at least about 89%, at least about 90%, at least about 91%, at least about 92%, at least about 93%, at least about 94%, at least about 95%, at least about 96%, at least about 97%, at least about 98%, at least about 99%, or 100% sequence identity to a reverse transcriptase domain of any one of SEQ ID NOs: 1-29, 393-401, or 427-439, or a variant thereof. In some embodiments, the reverse transcriptase comprises a sequence having at least 80% sequence identity to any one of SEQ ID NOs: 799-894 or 427-439, or a variant thereof. In some embodiments, the primer oligonucleotide comprises an oligo(dT) sequence or a degenerate sequence of at least six oligonucleotides. In some embodiments, the synthesizing cDNA comprises incubating the template RNA molecule, the primer oligonucleotide, and the reverse transcriptase in a reaction mixture under conditions suitable for extension of a DNA sequence from the RNA template. In some embodiments, the reaction mixture further comprises dNTPs, a reaction buffer, divalent metal ions, Mg²⁺, or Mn²⁺.

[0008] In some aspects, the present disclosure provides for a protein comprising a reverse transcriptase domain comprising a sequence having at least about 80%, at least about 81%, at least about 82%, at least about 83%, at least about 84%, at least about 85%, at least about 86%, at least about 87%, at least about 88%, at least about 89%, at least about 90%, at least about 91%, at least about 92%, at least about 93%, at least about 94%, at least about 95%, at least about 96%, at least about 97%, at least about 98%, at least about 99%, or 100% sequence identity to a reverse transcriptase domain of any one of SEQ ID NOs: 1-29, 393-401, or 427-439, or a variant thereof, wherein the sequence is fused N- or C-terminally to a non-retrotransposase domain or an affinity tag. In some embodiments, the reverse transcriptase domain comprises a sequence having at least 80% sequence identity to any one of SEQ ID NOs: 799-894, 427-439, or a variant thereof. In some embodiments, the non-retrotransposase domain is an RNA-binding protein domain. In some embodiments, the RNA binding protein domain comprises a bacteriophage MS2 coat protein (MCP) domain

[0009] In some aspects, the present disclosure provides for a nucleic acid encoding any of the proteins described herein.

[0010] In some aspects, the present disclosure provides for a nucleic acid encoding an open reading frame, wherein the open reading frame encodes an RT or endonuclease domain having at least about 80%, at least about 81%, at least about 82%, at least about 83%, at least about 84%, at least about 85%, at least about 86%, at least about 87%, at least about 88%, at least about 89%, at least about 90%, at least about 91%, at least about 92%, at least about 93%, at least about 94%, at least about 95%, at least about 96%, at least about 97%, at least about 98%, at least about 99%, or 100% sequence identity to an RT or endonuclease domain of any one of SEQ ID NOs: 1-29, 393-401, or 427-439, or a variant thereof, wherein: (a) the open reading frame is optimized for expression in an organism and the organism is different to the origin of the RT or endonuclease domain; or (b) the ORF comprises a sequence encoding an affinity tag. In some embodiments, the nucleic acid further encodes a retrotransposase comprising a sequence having at least about 80%, at least about 81%, at least about 82%, at least about 83%, at least about 84%, at least about 85%, at least about 86%, at least about 87%, at least about 88%, at least about 89%, at least about 90%, at least about 91%, at least about 92%, at least about 93%, at least about 94%, at least about 95%, at least about 96%, at least about 97%, at least about 98%, at least about 99%, or 100% sequence identity to an RT or endonuclease domain of any one of SEQ ID NOs: 1-29, 393-401, or 427-439, or a variant thereof.

[0011] In some embodiments, the present disclosure provides for an engineered retrotransposase system, comprising: (a) an RNA comprising a heterologous engineered cargo nucleotide sequence, wherein the cargo nucleotide sequence is configured to interact with a retrotransposase; and (b) a retrotransposase, wherein: (i) the retrotransposase is configured to transpose the cargo nucleotide sequence to a target nucleic acid locus; and (ii) the retrotransposase comprises a reverse transcriptase (RT) domain or an endonuclease domain comprising a sequence having at least about 80%, at least about 81%, at least about 82%, at least about 83%, at least about 84%, at least about 85%, at least about 86%, at least about 87%, at least about 88%, at least about 89%, at least about 90%, at least about 91%, at least about 92%, at least about 93%, at least about 94%, at least about 95%, at least about 96%, at least about 97%, at least about 98%, at least about 99%, or 100% sequence identity to a RT or endonuclease domain of SEQ ID NO: 402 or 895, or a variant thereof. In some embodiments, the retrotransposase further comprises any of the Zn-binding ribbon motifs of SEQ ID NO: 402 or 895. In some embodiments, the retrotransposase further comprises a sequence having at least 80% sequence identity to SEQ ID NO: 402 or 895, or a variant thereof. In some embodiments, the retrotransposase further comprises a conserved catalytic D, QG, [Y/F]XDD, or LG motif of SEQ ID NO: 402 or 895. In some embodiments, the retrotransposase further comprises a conserved CX_{[2-3]}C Zn finger motif of SEQ ID NO: 402 or 895. In some embodiments, the system further comprises: (c) a double-stranded DNA sequence comprising the target locus. In some embodiments, the RNA is an in vitro transcribed RNA. In some embodiments, the RNA comprises a sequence encoding the retrotransposase.

[0012] In some aspects, the present disclosure provides for an engineered DNA sequence, comprising: (a) a 5′ sequence capable of encoding an RNA sequence configured to interact with a retrotransposase; (b) a heterologous cargo sequence; (c) a sequence encoding a retrotransposase configured to interact with an RNA cognate of the 5′ sequence, wherein the retrotransposase comprises a reverse transcriptase (RT) domain, an endonuclease domain comprising a sequence having at least about 80%, at least about 81%, at least about 82%, at least about 83%, at least about 84%, at least about 85%, at least about 86%, at least about 87%, at least about 88%, at least about 89%, at least about 90%, at least about 91%, at least about 92%, at least about 93%, at least about 94%, at least about 95%, at least about 96%, at least about 97%, at least about 98%, at least about 99%, or 100% sequence identity to a RT or endonuclease domain of SEQ ID NO: 402 or 895, or a variant thereof; and (d) a 3′ sequence capable of encoding an RNA sequence configured to interact with the retrotransposase. In some embodiments, the retrotransposase further comprises any of the Zn-binding ribbon motifs of SEQ ID NO: 402 or 895. In some embodiments, the retrotransposase further comprises a sequence having at least 80% sequence identity to SEQ ID NO: 402 or 895, or a variant thereof. In some embodiments, the retrotransposase further comprises a conserved catalytic D, QG, [Y/F]XDD or LG motif of SEQ ID NO: 402 or 895. In some embodiments, the retrotransposase further comprises a conserved CX_{[2-3]}C Zn finger motif of SEQ ID NO: 402 or 895.

[0013] In some aspects, the present disclosure provides for a method for synthesizing complementary DNA (cDNA), comprising: (a) providing an RNA molecule as a template for cDNA synthesis, (b) providing a primer oligonucleotide to initiate cDNA synthesis from the RNA molecule; and (c) synthesizing cDNA initiated by the primer oligonucleotide from the template using a reverse transcriptase comprising a sequence having at least about 80%, at least about 81%, at least about 82%, at least about 83%, at least about 84%, at least about 85%, at least about 86%, at least about 87%, at least about 88%, at least about 89%, at least about 90%, at least about 91%, at least about 92%, at least about 93%, at least about 94%, at least about 95%, at least about 96%, at least about 97%, at least about 98%, at least about 99%, or 100% sequence identity to a reverse transcriptase domain of SEQ ID NO: 402 or 895, or a variant thereof. In some embodiments, the reverse transcriptase comprises a sequence having at least 80% sequence identity to SEQ ID NO: 402 or 895, or a variant thereof. In some embodiments, the primer oligonucleotide comprises an oligo(dT) sequence or a degenerate sequence of at least six oligonucleotides. In some embodiments, the synthesizing cDNA comprises incubating the template RNA molecule, the primer oligonucleotide, and the reverse transcriptase in a reaction mixture under conditions suitable for extension of a DNA sequence from the RNA template. In some embodiments, the reaction mixture further comprises dNTPs, a reaction buffer, divalent metal ions, Mg²⁺, or Mn²⁺.

[0014] In some aspects, the present disclosure provides for a protein comprising a reverse transcriptase domain comprising a sequence having at least about 80%, at least about 81%, at least about 82%, at least about 83%, at least about 84%, at least about 85%, at least about 86%, at least about 87%, at least about 88%, at least about 89%, at least about 90%, at least about 91%, at least about 92%, at least about 93%, at least about 94%, at least about 95%, at least about 96%, at least about 97%, at least about 98%, at least about 99%, or 100% sequence identity to a reverse transcriptase domain of SEQ ID NO: 402 or 895, or a variant thereof, wherein the sequence is fused N- or C-terminally to a non-retrotransposase domain or an affinity tag. In some embodiments, the reverse transcriptase domain comprises a sequence having at least 80% sequence identity to SEQ ID NO: 402 or 895, or a variant thereof. In some embodiments, the non-retrotransposase domain is an RNA-binding protein domain. In some embodiments, the RNA binding protein domain comprises a bacteriophage MS2 coat protein (MCP) domain.

[0015] In some aspects, the present disclosure provides for a nucleic acid encoding an open reading frame, wherein the open reading frame encodes an RT or endonuclease domain having at least about 80%, at least about 81%, at least about 82%, at least about 83%, at least about 84%, at least about 85%, at least about 86%, at least about 87%, at least about 88%, at least about 89%, at least about 90%, at least about 91%, at least about 92%, at least about 93%, at least about 94%, at least about 95%, at least about 96%, at least about 97%, at least about 98%, at least about 99%, or 100% sequence identity to an RT or endonuclease domain of SEQ ID NO: 402 or 895, or a variant thereof, wherein: (a) the open reading frame is optimized for expression in an organism and the organism is different to the origin of the RT or endonuclease domain; or (b) the ORF comprises a sequence encoding an affinity tag. In some embodiments, the nucleic acid further encodes a retrotransposase comprising a sequence having at least 80% sequence identity to SEQ ID NO: 402 or 895, or a variant thereof.

[0016] In some aspects, the present disclosure provides for a method for synthesizing complementary DNA (cDNA), comprising: (a) providing an RNA molecule as a template for cDNA synthesis, (b) providing a primer oligonucleotide to initiate cDNA synthesis from the RNA molecule; and (c) synthesizing cDNA initiated by the primer oligonucleotide from the template using a reverse transcriptase comprising a sequence having at least about 80%, at least about 81%, at least about 82%, at least about 83%, at least about 84%, at least about 85%, at least about 86%, at least about 87%, at least about 88%, at least about 89%, at least about 90%, at least about 91%, at least about 92%, at least about 93%, at least about 94%, at least about 95%, at least about 96%, at least about 97%, at least about 98%, at least about 99%, or 100% sequence identity to a reverse transcriptase domain of any one of SEQ ID NOs: 555-728, or a variant thereof. In some embodiments, the reverse transcriptase comprises a sequence having at least 80% sequence identity to any one of SEQ ID NOs: 555-560, 563, 564, 566, 567, 569, 572, 574, 580-582, 584-588, 592, 593, 596, 602, 604, 605, 608, 561, 562, 564, 565, 568, 571, 573, 576-579, 583, 590, 591, 594, 598, 601, 606, 607, or a variant thereof. In some embodiments, the reverse transcriptase comprises a sequence having at least 80% sequence identity to any one of SEQ ID NOs: 555-560, 563, 564, 566, 567, 569, 572, 574, 580-582, 584-588, 592, 593, 596, 602, 604, 605, 608, or a variant thereof. In some embodiments, the primer oligonucleotide comprises an oligo(dT) sequence or a degenerate sequence of at least six oligonucleotides. In some embodiments, the primer oligonucleotide comprises at least one phosphorothioate linkage. In some embodiments, the synthesizing cDNA comprises incubating the template RNA molecule, the primer oligonucleotide, and the reverse transcriptase in a reaction mixture under conditions suitable for extension of a DNA sequence from the RNA template. In some embodiments, the reaction mixture further comprises dNTPs, a reaction buffer, divalent metal ions, Mg²⁺, or Mn²⁺.

[0017] In some aspects, the present disclosure provides for a protein comprising a reverse transcriptase domain comprising a sequence having at least about 80%, at least about 81%, at least about 82%, at least about 83%, at least about 84%, at least about 85%, at least about 86%, at least about 87%, at least about 88%, at least about 89%, at least about 90%, at least about 91%, at least about 92%, at least about 93%, at least about 94%, at least about 95%, at least about 96%, at least about 97%, at least about 98%, at least about 99%, or 100% sequence identity to a reverse transcriptase domain of any one of SEQ ID NOs: 555-728, or a variant thereof, wherein the sequence is fused N- or C-terminally to a non-retrotransposase domain or an affinity tag. In some embodiments, the reverse transcriptase domain comprises a sequence having at least 80% sequence identity to any one of SEQ ID NOs: 555-560, 563, 564, 566, 567, 569, 572, 574, 580-582, 584-588, 592, 593, 596, 602, 604, 605, 608, 561, 562, 564, 565, 568, 571, 573, 576-579, 583, 590, 591, 594, 598, 601, 606, 607, or a variant thereof. In some embodiments, the reverse transcriptase comprises a sequence having at least 80% sequence identity to any one of SEQ ID NOs: 555-560, 563, 564, 566, 567, 569, 572, 574, 580-582, 584-588, 592, 593, 596, 602, 604, 605, 608, or a variant thereof. In some embodiments, the non-retrotransposase domain is an RNA-binding protein domain. In some embodiments, the RNA binding protein domain comprises a bacteriophage MS2 coat protein (MCP) domain. In some embodiments, the protein comprises a sequence having at least 80% sequence identity to any one of SEQ ID NOs: 30-32, 40-50, 740-756, 757-760, or a variant thereof. In some embodiments, the reverse transcriptase domain comprises a sequence having at least 80% sequence identity to any one of SEQ ID NOs: 555-558, 561-567, 569, 570, 575, or a variant thereof.

[0018] In some aspects, the present disclosure provides for a nucleic acid encoding an open reading frame, wherein the open reading frame encodes an RT or endonuclease domain having at least about 80%, at least about 81%, at least about 82%, at least about 83%, at least about 84%, at least about 85%, at least about 86%, at least about 87%, at least about 88%, at least about 89%, at least about 90%, at least about 91%, at least about 92%, at least about 93%, at least about 94%, at least about 95%, at least about 96%, at least about 97%, at least about 98%, at least about 99%, or 100% sequence identity to an RT or endonuclease domain of any one of SEQ ID NOs: 555-728, or a variant thereof, wherein: (a) the open reading frame is optimized for expression in an organism and the organism is different to the origin of the RT or endonuclease domain; or (b) the ORF comprises a sequence encoding an affinity tag. In some embodiments, the nucleic acid further encodes a retrotransposase comprising a sequence having at least 80% sequence identity to an RT or endonuclease domain of any one of SEQ ID NOs: 555-560, 563, 564, 566, 567, 569, 572, 574, 580-582, 584-588, 592, 593, 596, 602, 604, 605, 608, 561, 562, 564, 565, 568, 571, 573, 576-579, 583, 590, 591, 594, 598, 601, 606, 607, or a variant thereof. In some embodiments, the reverse transcriptase comprises a sequence having at least 80% sequence identity to any one of SEQ ID NOs: 555-560, 563, 564, 566, 567, 569, 572, 574, 580-582, 584-588, 592, 593, 596, 602, 604, 605, 608, or a variant thereof.

[0019] In some aspects, the present disclosure provides for a nucleic acid comprising a sequence comprising an open reading frame (ORF) comprising a sequence encoding a reverse transcriptase domain or a maturase domain having at least about 80%, at least about 81%, at least about 82%, at least about 83%, at least about 84%, at least about 85%, at least about 86%, at least about 87%, at least about 88%, at least about 89%, at least about 90%, at least about 91%, at least about 92%, at least about 93%, at least about 94%, at least about 95%, at least about 96%, at least about 97%, at least about 98%, at least about 99%, or 100% sequence identity to a reverse transcriptase domain or a maturase domain of any one of SEQ ID NOs: 729-733, or a variant thereof, wherein: (a) the open reading frame is optimized for expression in an organism and the organism is different to the origin of the RT or endonuclease domain; or (b) the ORF comprises a sequence encoding an affinity tag. In some embodiments, the ORF encodes a protein having at least 80% sequence identity to any one of SEQ ID NOs: 729-733, or a variant thereof. In some embodiments, the ORF is optimized for expression in the bacterial organism or wherein the organism is E. coli. In some embodiments, the ORF is optimized for expression in a mammalian organism or wherein the organism is a primate organism. In some embodiments, the primate organism is H. sapiens. In some embodiments, the ORF comprises an affinity tag operably linked to the sequence encoding the reverse transcriptase domain or the maturase domain, wherein the ORF has at least 80% sequence identity to any one of SEQ ID NOs: 298-302. In some embodiments, the ORF comprises a sequence having at least 80% sequence identity to any one of SEQ ID NOs: 303-307. In some embodiments, the reverse transcriptase domain or the maturase domain comprises a conserved Y[I/L]DD active site motif of any one of SEQ ID NOs: 729-733.

[0020] In some aspects, the present disclosure provides for a method for synthesizing complementary DNA (cDNA), comprising: (a) providing an RNA molecule as a template for cDNA synthesis; (b) providing a primer oligonucleotide to initiate cDNA synthesis from the RNA molecule; and (c) synthesizing cDNA initiated by the primer oligonucleotide from the template using a reverse transcriptase comprising a sequence having at least about 80%, at least about 81%, at least about 82%, at least about 83%, at least about 84%, at least about 85%, at least about 86%, at least about 87%, at least about 88%, at least about 89%, at least about 90%, at least about 91%, at least about 92%, at least about 93%, at least about 94%, at least about 95%, at least about 96%, at least about 97%, at least about 98%, at least about 99%, or 100% sequence identity to a reverse transcriptase domain of any one of SEQ ID NOs: 440-554, or a variant thereof. In some embodiments, the reverse transcriptase comprises a sequence having at least 80% sequence identity to any one of SEQ ID NOs: 518-522, 524-527, and 529-532, or a variant thereof. In some embodiments, the reverse transcriptase comprises a sequence having at least 80% sequence identity to any one of SEQ ID NOs: 526 or a variant thereof. In some embodiments, the primer oligonucleotide comprises an oligo(dT) sequence or a degenerate sequence of at least six oligonucleotides. In some embodiments, the synthesizing cDNA comprises incubating the template RNA molecule, the primer oligonucleotide, and the reverse transcriptase in a reaction mixture under conditions suitable for extension of a DNA sequence from the RNA template. In some embodiments, the reaction mixture further comprises dNTPs, a reaction buffer, divalent metal ions, Mg²⁺, or Mn²⁺.

[0021] In some aspects, the present disclosure provides for a protein comprising a reverse transcriptase domain comprising a sequence having at least about 80%, at least about 81%, at least about 82%, at least about 83%, at least about 84%, at least about 85%, at least about 86%, at least about 87%, at least about 88%, at least about 89%, at least about 90%, at least about 91%, at least about 92%, at least about 93%, at least about 94%, at least about 95%, at least about 96%, at least about 97%, at least about 98%, at least about 99%, or 100% sequence identity to a reverse transcriptase domain of any one of SEQ ID NOs: 440-554, or a variant thereof, wherein the sequence is fused N- or C-terminally to a non-retrotransposase domain or an affinity tag. In some embodiments, the reverse transcriptase domain comprises a sequence having at least 80% sequence identity to any one of SEQ ID NOs: 518-522, 524-527, and 529-532, or a variant thereof. In some embodiments, the reverse transcriptase comprises a sequence having at least 80% sequence identity to SEQ ID NO: 526, or a variant thereof. In some embodiments, the non-retrotransposase domain is an RNA-binding protein domain. In some embodiments, the RNA binding protein domain comprises a bacteriophage MS2 coat protein (MCP) domain. In some embodiments, the sequence is fused N- or C-terminally to an affinity tag.

[0022] In some aspects, the present disclosure provides for a nucleic acid encoding an open reading frame, wherein the open reading frame encodes an RT domain having at least about 80%, at least about 81%, at least about 82%, at least about 83%, at least about 84%, at least about 85%, at least about 86%, at least about 87%, at least about 88%, at least about 89%, at least about 90%, at least about 91%, at least about 92%, at least about 93%, at least about 94%, at least about 95%, at least about 96%, at least about 97%, at least about 98%, at least about 99%, or 100% sequence identity to an RT domain of any one of SEQ ID NOs: 440-554, or a variant thereof, wherein: (a) the open reading frame is optimized for expression in an organism and the organism is different to the origin of the RT or endonuclease domain; or (b) the ORF comprises a sequence encoding an affinity tag. In some embodiments, the nucleic acid further encodes an RT having at least 80% sequence identity to any one of SEQ ID NOs: 518-522, 524-527, and 529-532, or a variant thereof. In some embodiments, the reverse transcriptase comprises a sequence having at least 80% sequence identity to SEQ ID NOs: 526, or a variant thereof. In some embodiments, the open reading frame comprises a sequence having at least 80% sequence identity to any one of SEQ ID NOs: 356-373.

[0023] In some aspects, the present disclosure provides for a method for synthesizing complementary DNA (cDNA), comprising: (a) providing an RNA molecule as a template for cDNA synthesis; (b) providing a primer oligonucleotide to initiate cDNA synthesis from the RNA molecule; and (c) synthesizing cDNA initiated by the primer oligonucleotide from the template using a reverse transcriptase comprising a sequence having at least about 80%, at least about 81%, at least about 82%, at least about 83%, at least about 84%, at least about 85%, at least about 86%, at least about 87%, at least about 88%, at least about 89%, at least about 90%, at least about 91%, at least about 92%, at least about 93%, at least about 94%, at least about 95%, at least about 96%, at least about 97%, at least about 98%, at least about 99%, or 100% sequence identity to a reverse transcriptase domain of any one of SEQ ID NOs: 609-610, 611-615, 616-617, 618-622, 623, 624-626, 627-673, or a variant thereof. In some embodiments, the reverse transcriptase domain comprises a conserved xxDD, [F/Y]XDD, NAxxH, or VTG motif of any one of SEQ ID NOs: 609-610, 611-615, 616-617, 618-622, 623, 624-626, or 627-673. In some embodiments, the reverse transcriptase comprises a sequence having at least 80% sequence identity to any one of SEQ ID NOs: 612-613, 616-619, 622, 624, 627-630, 633, or a variant thereof. In some embodiments, the primer oligonucleotide comprises an oligo(dT) sequence or a degenerate sequence of at least six oligonucleotides. In some embodiments, the primer oligonucleotide comprises at least six consecutive nucleotides having at least 80% sequence identity to any one of SEQ ID NOs: 340-341, 342-344, 345-346, 347-351, 352, or 353-355. In some embodiments, the synthesizing cDNA comprises incubating the template RNA molecule, the primer oligonucleotide, and the reverse transcriptase in a reaction mixture under conditions suitable for extension of a DNA sequence from the RNA template. In some embodiments, the reaction mixture further comprises dNTPs, a reaction buffer, divalent metal ions, Mg²⁺, or Mn²⁺.

[0024] In some aspects, the present disclosure provides for a protein comprising a reverse transcriptase domain comprising a sequence having at least about 80%, at least about 81%, at least about 82%, at least about 83%, at least about 84%, at least about 85%, at least about 86%, at least about 87%, at least about 88%, at least about 89%, at least about 90%, at least about 91%, at least about 92%, at least about 93%, at least about 94%, at least about 95%, at least about 96%, at least about 97%, at least about 98%, at least about 99%, or 100% sequence identity to a reverse transcriptase domain of any one of SEQ ID NOs: 609-610, 611-615, 616-617, 618-622, 623, 624-626, 627-673, or a variant thereof, wherein the sequence is fused N- or C-terminally to a non-retrotransposase domain or affinity tag. In some embodiments, the reverse transcriptase domain comprises a conserved xxDD, [F/Y]XDD, NAxxH, or VTG motif of any one of SEQ ID NOs: 609-610, 611-615, 616-617, 618-622, 623, 624-626, or 627-673. In some embodiments, the reverse transcriptase domain comprises a sequence having at least 80% sequence identity to any one of SEQ ID NOs: 612-613, 616-619, 622, 624, 627-630, 633, or a variant thereof. In some embodiments, the non-retrotransposase domain is an RNA-binding protein domain. In some embodiments, the RNA binding protein domain comprises a bacteriophage MS2 coat protein (MCP) domain. In some embodiments, the sequence is fused N- or C-terminally to an affinity tag.

[0025] In some aspects, the present disclosure provides for a nucleic acid encoding an open reading frame (ORF) optimized for expression in an organism, wherein the open reading frame encodes an RT domain having at least about 80%, at least about 81%, at least about 82%, at least about 83%, at least about 84%, at least about 85%, at least about 86%, at least about 87%, at least about 88%, at least about 89%, at least about 90%, at least about 91%, at least about 92%, at least about 93%, at least about 94%, at least about 95%, at least about 96%, at least about 97%, at least about 98%, at least about 99%, or 100% sequence identity to an RT domain of any one of SEQ ID NOs: 609-610, 611-615, 616-617, 618-622, 623, 624-626, 627-673, or a variant thereof, wherein: (a) the open reading frame is optimized for expression in an organism and the organism is different to the origin of the RT or endonuclease domain; or (b) the ORF comprises a sequence encoding an affinity tag. In some embodiments, the reverse transcriptase domain comprises a conserved xxDD, [F/Y]XDD, NAxxH, or VTG motif of any one of SEQ ID NOs: 609-610, 611-615, 616-617, 618-622, 623, 624-626, or 627-673. In some embodiments, the nucleic acid further encodes an RT having at least 80% sequence identity to any one of SEQ ID NOs: 612-613, 616-619, 622, 624, 627-630, 633, or a variant thereof. In some embodiments, the ORF comprises a sequence encoding an affinity tag. In some embodiments, the open reading frame comprises a sequence having at least 80% sequence identity to any one of SEQ ID NOs: 308-309, 310-312, 313-314, 315-319, 320, 321-323, or 174-180. In some embodiments, the organism is different to the origin of the RT domain. In some embodiments, the ORF comprises a sequence having at least 80% sequence identity to any one of SEQ ID NOs: 324-325, 326-328, 329-330, 331-335, 336, 327-329, or 181-187.

[0026] In some aspects, the present disclosure provides for a synthetic oligonucleotide comprising at least six consecutive nucleotides having at least about 80%, at least about 81%, at least about 82%, at least about 83%, at least about 84%, at least about 85%, at least about 86%, at least about 87%, at least about 88%, at least about 89%, at least about 90%, at least about 91%, at least about 92%, at least about 93%, at least about 94%, at least about 95%, at least about 96%, at least about 97%, at least about 98%, at least about 99%, or 100% sequence identity to any one of SEQ ID NOs: 340-341, 342-344, 345-346, 347-351, 352, or 353-355. In some embodiments, the synthetic oligonucleotide comprises DNA nucleotides. In some embodiments, the oligonucleotide further comprises at least one phosphorothioate linkage.

[0027] In some aspects, the present disclosure provides for a vector comprising a sequence having at least about 80%, at least about 81%, at least about 82%, at least about 83%, at least about 84%, at least about 85%, at least about 86%, at least about 87%, at least about 88%, at least about 89%, at least about 90%, at least about 91%, at least about 92%, at least about 93%, at least about 94%, at least about 95%, at least about 96%, at least about 97%, at least about 98%, at least about 99%, or 100% sequence identity to any one of SEQ ID NOs: 340-341, 342-344, 345-346, 347-351, 352, or 353-355.

[0028] In some aspects, the present disclosure provides for a vector comprising any of the nucleic acids described herein.

[0029] In some aspects, the present disclosure provides for a host cell comprising any of the nucleic acids described herein. In some embodiments, the host cell is an E. coli cell. In some embodiments, the E. coli cell is a μDE3 lysogen or the E. coli cell is a BL21(DE3) strain. In some embodiments, the E. coli cell has an ompT ion genotype. In some embodiments, the nucleic acid comprises an open reading from (ORF) encoding a retrotransposase, a fragment thereof, or a reverse transcriptase domain, wherein the open reading frame is operably linked to a T7 promoter sequence, a T7-lac promoter sequence, a lac promoter sequence, a tac promoter sequence, a trc promoter sequence, a ParaBAD promoter sequence, a PrhaBAD promoter sequence, a T5 promoter sequence, a cspA promoter sequence, an araPBAD promoter, a strong leftward promoter from phage lambda (pL promoter), or any combination thereof. In some embodiments, the open reading frame comprises a sequence encoding an affinity tag linked in-frame to a sequence encoding the retrotransposase, the fragment thereof, or the reverse transcriptase domain.

[0030] In some aspects, the present disclosure provides for a culture comprising any of the host cells described herein in compatible liquid medium.

[0031] In some aspects, the present disclosure provides for a method of producing a retrotransposase, a fragment thereof, or a reverse transcriptase domain comprising cultivating any of the host cells described herein in compatible liquid medium. In some embodiments, the method further comprises inducing expression of the retrotransposase, the fragment thereof, or the reverse transcriptase domain by addition of an additional chemical agent or an increased amount of a nutrient. In some embodiments, the additional chemical agent or increased amount of a nutrient comprises Isopropyl β-D-1-thiogalactopyranoside (IPTG) or additional amounts of lactose. In some embodiments, the method further comprises isolating the host cell after the cultivation and lysing the host cell to produce a protein extract. In some embodiments, the method further comprises subjecting the protein extract to affinity chromatography specific to an affinity tag or ion-affinity chromatography.

[0032] In some aspects, the present disclosure provides for an in vitro transcribed mRNA comprising an RNA cognate of any the nucleic acids described herein.

[0033] In some aspects, the present disclosure provides for an engineered retrotransposase system, comprising: (a) a double-stranded nucleic acid comprising a cargo nucleotide sequence, wherein the cargo nucleotide sequence is configured to interact with a retrotransposase; and (b) a retrotransposase, wherein: (i) the retrotransposase is configured to transpose the cargo nucleotide sequence to a target nucleic acid locus; and (ii) the retrotransposase is derived from an uncultivated microorganism. In some embodiments, the cargo nucleotide sequence is engineered. In some embodiments, the cargo nucleotide sequence is heterologous. In some embodiments, the cargo nucleotide sequence does not have the sequence of a wild-type genome sequence present in an organism. In some embodiments, the retrotransposase comprises a sequence having at least 75% sequence identity to any one of SEQ ID NOs: 1-29. In some embodiments, the retrotransposase comprises a reverse transcriptase domain. In some embodiments, the retrotransposase further comprises one or more zinc finger domains. In some embodiments, the retrotransposase further comprises an endonuclease domain. In some embodiments, the retrotransposase has less than 80% sequence identity to a documented retrotransposase. In some embodiments, the cargo nucleotide sequence is flanked by a 3′ untranslated region (UTR) and a 5′ untranslated region (UTR). In some embodiments, the retrotransposase is configured to transpose the cargo nucleotide sequence via a ribonucleic acid polynucleotide intermediate. In some embodiments, the retrotransposase comprises one or more nuclear localization sequences (NLSs) proximal to an N- or C-terminus of the retrotransposase. In some embodiments, the NLS comprises a sequence at least 80% identical to a sequence selected from the group consisting of SEQ ID NO: 896-911. In some embodiments, the sequence identity is determined by a BLASTP, CLUSTALW, MUSCLE, MAFFT, or CLUSTALW with the parameters of the Smith-Waterman homology search algorithm. In some embodiments, the sequence identity is determined by the BLASTP homology search algorithm using parameters of a wordlength (W) of 3, an expectation (E) of 10, and a BLOSUM62 scoring matrix setting gap costs at existence of 11, extension of 1, and using a conditional compositional score matrix adjustment.

[0034] In some aspects, the present disclosure provides for an engineered retrotransposase system, comprising: (a) a double-stranded nucleic acid comprising a cargo nucleotide sequence, wherein the cargo nucleotide sequence is configured to interact with a retrotransposase; and (b) a retrotransposase, wherein: (i) the retrotransposase is configured to transpose the cargo nucleotide sequence to a target nucleic acid locus; and (ii) the retrotransposase comprises a sequence having at least 75% sequence identity to any one of SEQ ID NOs: 1-29 In some embodiments, the retrotransposase is derived from an uncultivated microorganism. In some embodiments, the retrotransposase comprises a reverse transcriptase domain. In some embodiments, the retrotransposase further comprises one or more zinc finger domains. In some embodiments, the retrotransposase further comprises an endonuclease domain. In some embodiments, the retrotransposase has less than 80% sequence identity to a documented retrotransposase. In some embodiments, the cargo nucleotide sequence is flanked by a 3′ untranslated region (UTR) and a 5′ untranslated region (UTR). In some embodiments, the retrotransposase is configured to transpose the cargo nucleotide sequence via a ribonucleic acid polynucleotide intermediate. In some embodiments, the sequence identity is determined by a BLASTP, CLUSTALW, MUSCLE, MAFFT, or CLUSTALW with the parameters of the Smith-Waterman homology search algorithm. In some embodiments, the sequence identity is determined by the BLASTP homology search algorithm using parameters of a wordlength (W) of 3, an expectation (E) of 10, and a BLOSUM62 scoring matrix setting gap costs at existence of 11, extension of 1, and using a conditional compositional score matrix adjustment.

[0035] In some aspects, the present disclosure provides for a deoxyribonucleic acid polynucleotide encoding the engineered retrotransposase system of any one of the aspects or embodiments described herein.

[0036] In some aspects, the present disclosure provides for a nucleic acid comprising an engineered nucleic acid sequence optimized for expression in an organism, wherein the nucleic acid encodes a retrotransposase, and wherein the retrotransposase is derived from an uncultivated microorganism, wherein the organism is not the uncultivated microorganism. In some embodiments, the retrotransposase comprises a variant having at least 75% sequence identity to any one of SEQ ID NOs: 1-29. In some embodiments, the retrotransposase comprises a sequence encoding one or more nuclear localization sequences (NLSs) proximal to an N- or C-terminus of the retrotransposase. In some embodiments, the NLS comprises a sequence selected from SEQ ID NOs: 896-911. In some embodiments, the NLS comprises SEQ ID NO: 897. In some embodiments, the NLS is proximal to the N-terminus of the retrotransposase. In some embodiments, the NLS comprises SEQ ID NO: 896. In some embodiments, the NLS is proximal to the C-terminus of the retrotransposase. In some embodiments, the organism is prokaryotic, bacterial, eukaryotic, fungal, plant, mammalian, rodent, or human

[0037] In some aspects, the present disclosure provides for a vector comprising the nucleic acid of any one of the aspects or embodiments described herein. In some embodiments, the vector further comprises a nucleic acid encoding a cargo nucleotide sequence configured to form a complex with the retrotransposase. In some embodiments, the vector is a plasmid, a minicircle, a CELiD, an adeno-associated virus (AAV) derived virion, or a lentivirus.

[0038] In some aspects, the present disclosure provides for a cell comprising the vector of any one of any one of the aspects or embodiments described herein.

[0039] In some aspects, the present disclosure provides for a method of manufacturing a retrotransposase, comprising cultivating the cell of any of the aspects or embodiments described herein.

[0040] In some aspects, the present disclosure provides for a method for binding, nicking, cleaving, marking, modifying, or transposing a double-stranded deoxyribonucleic acid polynucleotide, comprising: (a) contacting the double-stranded deoxyribonucleic acid polynucleotide with a retrotransposase configured to transpose the cargo nucleotide sequence to a target nucleic acid locus; wherein the retrotransposase comprises a sequence having at least 75% sequence identity to any one of SEQ ID NOs: 1-29. In some embodiments, the retrotransposase is derived from an uncultivated microorganism. In some embodiments, the retrotransposase comprises a reverse transcriptase domain. In some embodiments, the retrotransposase further comprises one or more zinc finger domains. In some embodiments, the retrotransposase further comprises an endonuclease domain. In some embodiments, the retrotransposase has less than 80% sequence identity to a documented retrotransposase. In some embodiments, the cargo nucleotide sequence is flanked by a 3′ untranslated region (UTR) and a 5′ untranslated region (UTR). In some embodiments, the double-stranded deoxyribonucleic acid polynucleotide is transposed via a ribonucleic acid polynucleotide intermediate. In some embodiments, the double-stranded deoxyribonucleic acid polynucleotide is a eukaryotic, plant, fungal, mammalian, rodent, or human double-stranded deoxyribonucleic acid polynucleotide.

[0041] In some aspects, the present disclosure provides for a method of modifying a target nucleic acid locus, the method comprising delivering to the target nucleic acid locus the engineered retrotransposase system of any one of the aspects or embodiments described herein, wherein the retrotransposase is configured to transpose the cargo nucleotide sequence to the target nucleic acid locus, and wherein the complex is configured such that upon binding of the complex to the target nucleic acid locus, the complex modifies the target nucleic acid locus In some embodiments, modifying the target nucleic acid locus comprises binding, nicking, cleaving, marking, modifying, or transposing the target nucleic acid locus. In some embodiments, the target nucleic acid locus comprises deoxyribonucleic acid (DNA). In some embodiments, the target nucleic acid locus comprises genomic DNA, viral DNA, or bacterial DNA. In some embodiments, the target nucleic acid locus is in vitro. In some embodiments, the target nucleic acid locus is within a cell. In some embodiments, the cell is a prokaryotic cell, a bacterial cell, a eukaryotic cell, a fungal cell, a plant cell, an animal cell, a mammalian cell, a rodent cell, a primate cell, a human cell, or a primary cell. In some embodiments, the cell is a primary cell. In some embodiments, the primary cell is a T cell. In some embodiments, the primary cell is a hematopoietic stem cell (HSC).

[0042] In some aspects, the present disclosure provides for a method of any one of the aspects or embodiments described herein, wherein delivering the engineered retrotransposase system to the target nucleic acid locus comprises delivering the nucleic acid of any one of the aspects or embodiments described herein or the vector of any of the aspects or embodiments described herein. In some embodiments, delivering the engineered retrotransposase system to the target nucleic acid locus comprises delivering a nucleic acid comprising an open reading frame encoding the retrotransposase. In some embodiments, the nucleic acid comprises a promoter to which the open reading frame encoding the retrotransposase is operably linked. In some embodiments, delivering the engineered retrotransposase system to the target nucleic acid locus comprises delivering a capped mRNA containing the open reading frame encoding the retrotransposase. In some embodiments, delivering the engineered retrotransposase system to the target nucleic acid locus comprises delivering a translated polypeptide. In some embodiments, the retrotransposase does not induce a break at or proximal to the target nucleic acid locus.

[0043] In some aspects, the present disclosure provides for a host cell comprising an open reading frame encoding a heterologous retrotransposase having at least 75% sequence identity to any one of SEQ ID NOs: 1-29 or a variant thereof. In some embodiments, the host cell is an E. coli cell. In some embodiments, the E. coli cell is a λDE3 lysogen or the E. coli cell is a BL21(DE3) strain. In some embodiments, the E. coli cell has an ompT lon genotype. In some embodiments, the open reading frame is operably linked to a T7 promoter sequence, a T7-lac promoter sequence, a lac promoter sequence, a tac promoter sequence, a trc promoter sequence, a ParaBAD promoter sequence, a PrhaBAD promoter sequence, a T5 promoter sequence, a cspA promoter sequence, an araPBAD promoter, a strong leftward promoter from phage lambda (pL promoter), or any combination thereof. In some embodiments, the open reading frame comprises a sequence encoding an affinity tag linked in-frame to a sequence encoding the retrotransposase. In some embodiments, the affinity tag is an immobilized metal affinity chromatography (IMAC) tag. In some embodiments, the IMAC tag is a polyhistidine tag. In some embodiments, the affinity tag is a myc tag, a human influenza hemagglutinin (HA) tag, a maltose binding protein (MBP) tag, a glutathione S-transferase (GST) tag, a streptavidin tag, a FLAG tag, or any combination thereof. In some embodiments, the affinity tag is linked in-frame to the sequence encoding the retrotransposase via a linker sequence encoding a protease cleavage site. In some embodiments, the protease cleavage site is a tobacco etch virus (TEV) protease cleavage site, a PreScission® protease cleavage site, a Thrombin cleavage site, a Factor Xa cleavage site, an enterokinase cleavage site, or any combination thereof. In some embodiments, the open reading frame is codon-optimized for expression in the host cell. In some embodiments, the open reading frame is provided on a vector. In some embodiments, the open reading frame is integrated into a genome of the host cell

[0044] In some aspects, the present disclosure provides for a culture comprising the host cell of any one of the aspects or embodiments described herein in compatible liquid medium.

[0045] In some aspects, the present disclosure provides for a method of producing a retrotransposase, comprising cultivating the host cell of any one of the aspects or embodiments described herein in compatible growth medium. In some embodiments, the method further comprises inducing expression of the retrotransposase by addition of an additional chemical agent or an increased amount of a nutrient. In some embodiments, the additional chemical agent or increased amount of a nutrient comprises Isopropyl β-D-1-thiogalactopyranoside (IPTG) or additional amounts of lactose. In some embodiments, the method further comprising isolating the host cell after the cultivation and lysing the host cell to produce a protein extract. In some embodiments, the method further comprises subjecting the protein extract to IMAC, or ion-affinity chromatography. In some embodiments, the open reading frame comprises a sequence encoding an IMAC affinity tag linked in-frame to a sequence encoding the retrotransposase. In some embodiments, the IMAC affinity tag is linked in-frame to the sequence encoding the retrotransposase via a linker sequence encoding protease cleavage site. In some embodiments, the protease cleavage site comprises a tobacco etch virus (TEV) protease cleavage site, a PreScission® protease cleavage site, a Thrombin cleavage site, a Factor Xa cleavage site, an enterokinase cleavage site, or any combination thereof. In some embodiments, the IMAC affinity tag by contacting a protease corresponding to the protease cleavage site to the retrotransposase. In some embodiments, the method further comprises performing subtractive IMAC affinity chromatography to remove the affinity tag from a composition comprising the retrotransposase.

[0046] In some aspects, the present disclosure provides for a method of disrupting a locus in a cell, comprising contacting to the cell a composition comprising: (a) a double-stranded nucleic acid comprising a cargo nucleotide sequence, wherein the cargo nucleotide sequence is configured to interact with a retrotransposase; and (b) a retrotransposase, wherein: (i) the retrotransposase is configured to transpose the cargo nucleotide sequence to a target nucleic acid locus; (ii) the retrotransposase comprises a sequence having at least 75% sequence identity to any one of SEQ ID NOs: 1-29; and (iii) the retrotransposase has at least equivalent transposition activity to a documented retrotransposase in a cell. In some embodiments, the transposition activity is measured in vitro by introducing the retrotransposase to cells comprising the target nucleic acid locus and detecting transposition of the target nucleic acid locus in the cells. In some embodiments, the composition comprises 20 pmoles or less of the retrotransposase. In some embodiments, the composition comprises 1 pmol or less of the retrotransposase.

[0047] In some aspects, the present disclosure provides for a host cell comprising an open reading frame encoding any of the proteins described herein. In some embodiments, the host cell is an E. coli cell or a mammalian cell. In some embodiments, the host cell is an E. coli cell, wherein the E. coli cell is a λDE3 lysogen or the E. coli cell is a BL21(DE3) strain. In some embodiments, the E. coli cell has an ompT ion genotype. In some embodiments, the open reading frame is operably linked to a T7 promoter sequence, a T7-lac promoter sequence, a lac promoter sequence, a tac promoter sequence, a trc promoter sequence, a ParaBAD promoter sequence, a PrhaBAD promoter sequence, a T5 promoter sequence, a cspA promoter sequence, an araPBAD promoter, a strong leftward promoter from phage lambda (pL promoter), or any combination thereof. In some embodiments, the open reading frame comprises a sequence encoding an affinity tag linked in-frame to a sequence encoding the protein. In some embodiments, the affinity tag is an immobilized metal affinity chromatography (IMAC) tag. In some embodiments, the IMAC tag is a polyhistidine tag. In some embodiments, the affinity tag is a myc tag, a human influenza hemagglutinin (HA) tag, a maltose binding protein (MBP) tag, a glutathione S-transferase (GST) tag, a streptavidin tag, a strep tag, a FLAG tag, or any combination thereof. In some embodiments, the affinity tag is linked in-frame to the sequence encoding the protein via a linker sequence encoding a protease cleavage site. In some embodiments, the protease cleavage site is a tobacco etch virus (TEV) protease cleavage site, a PreScission® protease cleavage site, a Thrombin cleavage site, a Factor Xa cleavage site, an enterokinase cleavage site, or any combination thereof. In some embodiments, the open reading frame is codon-optimized for expression in the host cell. In some embodiments, the open reading frame is provided on a vector. In some embodiments, the open reading frame is integrated into a genome of the host cell.

[0048] In some aspects, the present disclosure provides for a culture comprising any of the host cells described herein in compatible liquid medium.

[0049] In some aspects, the present disclosure provides for a method of producing any of the proteins described herein, comprising cultivating any of the host cells described herein encoding any of the proteins described herein in compatible growth medium. In some embodiments, the method further comprises inducing expression of the protein. In some embodiments, the inducing expression of the nuclease is by addition of an additional chemical agent or an increased amount of a nutrient, or by temperature increase or decrease. In some embodiments, an additional chemical agent or an increased amount of a nutrient comprises Isopropyl β-D-1-thiogalactopyranoside (IPTG) or additional amounts of lactose. In some embodiments, the method further comprises isolating the host cell after the cultivation and lysing the host cell to produce a protein extract comprising the protein. In some embodiments, the method further comprises isolating the protein. In some embodiments, the isolating comprises subjecting the protein extract to IMAC, ion-exchange chromatography, anion exchange chromatography, or cation exchange chromatography. In some embodiments, the host cell comprises a nucleic acid comprising an open reading frame comprising a sequence encoding an affinity tag linked in-frame to a sequence encoding the protein. In some embodiments, the affinity tag is linked in-frame to the sequence encoding the protein via a linker sequence encoding a protease cleavage site. In some embodiments, the protease cleavage site comprises a tobacco etch virus (TEV) protease cleavage site, a PreScission® protease cleavage site, a Thrombin cleavage site, a Factor Xa cleavage site, an enterokinase cleavage site, or any combination thereof. In some embodiments, the method further comprises cleaving the affinity tag by contacting a protease corresponding to the protease cleavage site to the protein. In some embodiments, the affinity tag is an IMAC affinity tag. In some embodiments, the method further comprises performing subtractive IMAC affinity chromatography to remove the affinity tag from a composition comprising the protein.

[0050] Additional aspects and advantages of the present disclosure will become readily apparent to those skilled in this art from the following detailed description, wherein only illustrative embodiments of the present disclosure are shown and described. As will be realized, the present disclosure is capable of other and different embodiments, and its several details are capable of modifications in various obvious respects, all without departing from the disclosure. Accordingly, the drawings and description are to be regarded as illustrative in nature, and not as restrictive.

### INCORPORATION BY REFERENCE

[0051] All publications, patents, and patent applications mentioned in this specification are herein incorporated by reference to the same extent as if each individual publication, patent, or patent application was specifically and individually indicated to be incorporated by reference.

### BRIEF DESCRIPTION OF THE DRAWINGS

[0052] The novel features of the invention are set forth with particularity in the appended claims. A better understanding of the features and advantages of the present invention will be obtained by reference to the following detailed description that sets forth illustrative embodiments, in which the principles of the invention are utilized, and the accompanying drawings of which:

[0053] FIG. 1 depicts the genomic context of a bacterial retrotransposon. MG140-1 is a predicted retrotransposase (arrow) encoding a Zn-finger DNA binding domain and a reverse transcriptase domain. Regions flanking the retrotransposase display secondary structure that possibly represent binding sites for the retrotransposase (Secondary structure boxes and zoomed images). Regions of similarity with other homologs indicate putative target sites at which the retrotransposon integrated.

[0054] FIG. 2A and FIG. 2B depict multiple sequence alignment (MSA) of MG retrotransposase protein sequences of the family MG140. FIG. 2A depicts MSA of the reverse transcriptase domain. Conserved catalytic residues D, QG, [Y/F]ADD, and LG are highlighted on the consensus sequence. FIG. 2B depicts MSA of a Zn-finger and endonuclease domains. Zn-finger motifs (CX_{[2-3]}C), part of the endonuclease domain and nuclease catalytic residues are highlighted on the consensus sequence.

[0055] FIG. 3A and FIG. 3B depict a phylogenetic gene tree of MG and reference retrotransposase genes. FIG. 3A depicts microbial MG retrotransposases (black branches on clade 4) are more closely related to Eukaryotic than viral retrotransposases (grey branches on clade 6). Clade 1: Telomerase reverse transcriptases; clade 2: Group II intron reverse transcriptases; clade 3: Eukaryotic R1 type retrotransposases; clade 4: microbial and Eukaryotic R2 retrotransposases; clade 5: Eukaryotic retrovirus-related reverse transcriptases; and clade 6: viral reverse transcriptases. FIG. 3B depicts Clades 3 and 4 from the phylogenetic gene tree from FIG. 3A. Some microbial MG retrotransposases contain multiple Zn-finger motifs (vertical rectangles), the conserved RVT_1 reverse transcriptase domain, and APE/RLE or other endonuclease domains (top and bottom panel). Some microbial MG retrotransposases lack an endonuclease domain (mid-panel).

[0056] FIG. 4 depicts a phylogenetic tree inferred from a multiple sequence alignment of the reverse transcriptase domain from diverse enzymes. RT sequences were derived from DNA, as well as RNA assemblies. Reference RTs were included in the tree for classification purposes.

[0057] FIG. 5A depicts a phylogenetic tree inferred from a multiple sequence alignment of RT domains identified from novel families of non-LTR retrotransposases (MG140, MG146 and MG147) and related RTs (MG148). FIG. 5B depicts data demonstrating that non-LTR retrotransposases (MG140, MG146 and MG147) contain an RT domain, an endonuclease domain (Endo), and multiple zinc-binding ribbon motifs, while family MG148 RTs lack an endonuclease domain.

[0058] FIG. 6A depicts data demonstrating that MG140 R2 retrotransposases contain RT and endonuclease (EN) domains, as well as multiple zinc-fingers, and share between 24% and 26% average amino acid identity (AAI) with the reference Danio rerio R2 retrotransposase (R2Dr).

[0059] FIG. 6B depicts data demonstrating that the MG140-47 R2 retrotransposon integrates into 28S rRNA gene. Alignment of the MG140-47 contig to a reference (GQ398061) ribosomal RNA operon shows a large gap in the reference 28S rDNA gene due to integration of the R2 element into the MG140-47 28S rDNA gene (dotted box).

[0060] FIG. 7A depicts genomic context of the MG145-45 retrotransposon. The enzyme contains RT and Zinc-finger domains. A partial 18S rDNA gene hit at the 5′ end and poly-A tail at the 3′ end likely delineate the boundaries of the transposon. FIG. 7B depicts alignment of MG140-3, MG140-8, and MG140-45 genomic sequences, showing conservation of the 18S rRNA gene to position 200 of the alignment and indicating integration of the R2 elements into the 18S rDNA gene (arrow).

[0061] FIG. 8A depicts the contig encoding the MG146-1 retrotransposase with RT and endonuclease domains. FIG. 8B depicts the MG140-17-R2 retrotransposon encoding three genes predicted to be involved in mobilization: RNA recognition motif gene (RRM); endonuclease enzyme; and reverse transcriptase with RT and RNAse H domains.

[0062] FIG. 9A depicts genomic context of two members of the MG148 family of RTs. Predicted genes not associated with the RT are displayed as white arrows. FIG. 9B depicts nucleotide sequence alignment of five members of the MG148 family indicating conserved regions (boxes underneath the sequence) upstream of the RT (arrow annotated over the consensus sequence).

[0063] FIG. 10 depicts screening of in vitro activity of RTns family of enzymes by qPCR (MG140). Activity was detected by qPCR using primers that amplify the full-length cDNA product derived from a primer extension reaction containing the respective RT. Samples are derived from RT reactions containing 100 nM substrate. Negative control: no-template water control in the PURExpress reaction; positive control 1: R2Tg (Taeniopygia guttata); positive control 2: R2Bm (Bombyx mori). The two positive controls are documented R2 retrotransposons. Active candidates, defined as at least 10-fold signal above the negative control, are marked in dark grey while candidates inactive in these conditions are in light grey.

[0064] FIG. 11 depicts screening of in vitro activity of RTns family of enzymes by qPCR (MG146, MG147, MG148). Activity was detected by qPCR using primers that amplify the full-length cDNA product derived from a primer extension reaction containing the respective RT. Samples are derived from RT reactions containing 100 nM substrate. Negative control: no-template water control in the PURExpress reaction; positive control 1: R2Tg (Taeniopygia guttata), a documented R2 retrotransposon. Active candidates, defined as at least 10-fold signal above the negative control, are marked in dark grey while candidates inactive in these conditions are in light grey.

[0065] FIG. 12 depicts an assay to assess the fidelity of R2 and R2-like candidates by next generation sequencing. The resulting cDNA product from a primer extension reaction was PCR-amplified and library prepped for NGS. Trimmed reads were aligned to the reference sequence and the frequency of misincorporation was calculated. Background: no-template water control in the PURExpress reaction; positive control 1: R2Tg (Taeniopygia guttata).

[0066] FIG. 13A depicts a phylogenetic tree inferred from a multiple sequence alignment of full-length Group II intron RTs identified from novel families from diverse classes. FIG. 13B depicts a summary table of MG families of Group II introns. AAI: average pairwise amino acid identity of MG families to reference Group II intron sequences.

[0067] FIGS. 14A-14D depict screening of in vitro activity of GII intron Class C candidates MG153-1 through MG153-21 and MG153-25 through MG153-27 by primer extension assay. For FIG. 14A through FIG. 14C, lane numbers correspond to the following: 1-PURExpress no template control, 2-MMLV control RT, 3-TGIRT-III control RT, 4-MarathonRT control RT. Numbering in bold corresponds to gel lanes with active novel candidates. Results are representative of two independent experiments. FIG. 14A lane numbers 5-14 correspond to novel candidates MG153-1 through MG153-10. FIG. 14B lane numbers 5-14 correspond to novel candidates MG153-11 through MG153-20. FIG. 14C lane numbers 5-8 correspond to novel candidates MG153-21, MG153-25, MG153-26, and MG153-27, respectively. FIG. 14D depicts detection of full-length cDNA production by qPCR. Dark grey bars correspond to RTs that generate product at least 10-fold above background. Results were determined from two technical replicates. Arrows in FIG. 14A through FIG. 14C indicate full-length cDNA product (arrow near the top of the gel) and examples of cDNA drop off (lower arrows).

[0068] FIGS. 15A-15D depict screening of in vitro activity of GII intron Class C candidates MG153-28 through MG153-37 and MG153-39 through MG153-57 by primer extension assay. For FIG. 15A through FIG. 15C, lane numbers correspond to the following: 1-PURExpress no template control, 2-MMLV control RT, 3-TGIRT-III control RT. Numbering in bold corresponds to gel lanes. FIG. 15A lane numbers 4-13 correspond to novel candidates MG153-28 through MG153-37. FIG. 15B lane numbers 4-13 correspond to novel candidates MG153-39 through MG153-48. FIG. 15C lane numbers 4-13 correspond to novel candidates MG153-49 through MG153-57. FIG. 15D depicts detection of full-length cDNA production by qPCR. Dark grey bars correspond to RTs that generate product at least 10-fold above background. Results were determined from two technical replicates. Arrows in FIG. 15A through FIG. 15C indicate full-length cDNA product (arrow near the top of the gel) and examples of cDNA drop off (lower arrows).

[0069] FIG. 16A and FIG. 16B depict screening of in vitro activity of GII intron Class D MG165 family of reverse transcriptases by primer extension assay. For FIG. 16A, lane numbers correspond to the following: 1-PURExpress no template control, 2-MMLV control RT, 3-TGIRT-III control RT, 4 through 12-novel candidates MG165-1 through 9. Numbering in bold corresponds to gel lanes with active novel candidates. FIG. 16B depicts quantification of full-length cDNA production by qPCR. Dark grey bars correspond to RTs that generate product at least 10-fold above background. Results were determined from two technical replicates. Arrows in FIG. 16A indicate full-length cDNA product (arrow near the top of the gel) and examples of cDNA drop off (lower arrows).

[0070] FIG. 17A and FIG. 17B depict screening of in vitro activity of GII intron Class F MG167 family of reverse transcriptases by primer extension assay. For FIG. 17A, lane numbers correspond to the following: 1-PURExpress no template control, 2-MMLV control RT, 3-TGIRT-III control RT, 4 through-novel candidates MG167-1 through 8. Numbering in bold corresponds to gel lanes with active novel candidates. FIG. 17B depicts quantification of full-length cDNA production by qPCR. Dark grey bars correspond to RTs that generate product at least 10-fold above background. Results were determined from two technical replicates. Arrows in FIG. 17A indicate full-length cDNA product (arrow near the top of the gel) and examples of cDNA drop off (lower arrows).

[0071] FIG. 18 depicts an assay to assess the fidelity of GII intron Class C RT candidates from the MG153 family by next generation sequencing. The resulting cDNA product from a primer extension reaction was PCR-amplified and library prepped for NGS. Trimmed reads were aligned to the reference sequence and the frequency of misincorporation was calculated. Results were determined from two independent experiments.

[0072] FIGS. 19A-19C depict screening to assess the ability of indicated control RTs and GII intron Class C candidates to synthesize cDNA in mammalian cells. FIG. 19A depicts detection of 542 bp (top) and 100 bp (bottom) PCR products by agarose gel analysis. FIG. 19B depicts detection of 542 bp (top) and 100 bp (bottom) PCR products by D1000 TapeStation. FIG. 19C depicts detection of 542 bp PCR products by D1000 TapeStation for additional candidates. Lanes not relevant for the described experiment in FIG. 19A and FIG. 19B are covered by black boxes.

[0073] FIG. 20A depicts a phylogenetic tree of full-length G2L4-like RTs. Reference G2L4 sequences and MG172 candidates (dots) are highlighted. FIG. 20B depicts data demonstrating that columns 277 to 280 of reference and MG172 RTs represent the catalytic residues responsible for reverse transcriptase function.

[0074] FIG. 21A depicts a phylogenetic tree of full-length LTR RTs. Reference LTR RT sequences and MG151 candidates (dots) are highlighted. FIG. 21B depicts genomic context of MG151-82 RT (labeled ORF 7). Predicted domains are shown as dark boxes and long terminal repeats (LTR) are shown as arrows flanking the LTR transposon. FIG. 21C depicts 3D structure prediction of MG151-82 showing the protease, RT, RNAse H and integrase domains.

[0075] FIG. 22 depicts multiple sequence alignment of full-length pol protein sequences to highlight the protease, RT-RNAse H, and integrase domains. Catalytic residues for the RT, RNAse H, and integrase domains of the MMLV RT are shown by bars under each domain. The protease domain of the MMLV reference sequence is not shown in the alignment.

[0076] FIGS. 23A-23C depict screening of in vitro activity of viral candidates MG151-80 through MG151-97 by primer extension assay. For FIG. 23A, lane numbers correspond to the following: 1-RNA template annealed to primer; 2-MMLV control RT; 3-Ty3 control RT; 4 through 9 novel candidates MG151-80 through 85; 10-RT control. For FIG. 23B, lane numbers correspond to the following: 1-RNA template annealed to primer, 2 through 12-novel candidates MG151-87 through 97, 13-MMLV control RT. FIG. 23C depicts testing of in vitro activity of Ty3 control RT in different buffer conditions. Lane numbers correspond to the following: 1-PURExpress no template control; 2-Buffer A (40 mM Tris-HCl pH 7.5, 0.2 M NaCl, 10 mM MgCl₂, 1 mM TCEP); 3-Buffer B (20 mM Tris pH 7.5, 150 mM KCl, 5 mM MgCl₂, 1 mM TCEP, 2% PEG-8000); 4-Buffer C (10 mm Tris-HCl pH 7.5, 80 mm NaCl, 9 mm MgCl₂, 1 mM TCEP, 0.01% (v/v) Triton X-100); 5-Buffer D (10 mM Tris pH 7.5, 130 mM NaCl, 9 mM MgCl₂, 1 mM TCEP, 10% glycerol). Arrows in FIG. 23A through FIG. 23C indicate full-length cDNA product (arrow near the top of the gel) and examples of cDNA drop off (lower arrows).

[0077] FIG. 24A and FIG. 24B depict testing of in vitro RT processivity and priming parameters of candidates MG151-89, MG151-92, and MG151-97 on a structured RNA template. For FIG. 24A and FIG. 24B, lane 1: 6, 10, and 16 nucleotide oligo markers (arrows); lane 2: 8, 13, and 20 nucleotide oligo marker; lane 3: 43 and 55 nucleotide oligo marker; lanes 4 and 10: 6 nucleotide primer; lanes 5 and 11: 8 nucleotide primer; lanes 6 and 12: 10 nucleotide primer; lanes 7 and 13: 13 nucleotide primer; lanes 8 and 14: 16 nucleotide primer; lanes 9 and 15: 20 nucleotide primer. FIG. 24A lanes 4-9 correspond to reverse transcription reactions containing MMLV with varying primer lengths. MMLV reverse transcribes through the structured RNA hairpin. Lanes 10-15 correspond to reverse transcription reactions containing MG151-89 with varying primer lengths. MG151-89 prefers primer lengths of 16 and 20 nucleotides and appears to stop reverse transcription at the structured RNA hairpin. FIG. 24B lanes 4-9 correspond to reverse transcription reactions containing MG151-92 with varying primer lengths. Lanes 10-15 correspond to reverse transcription reactions containing MG151-97 with varying primer lengths. Neither MG151-92 or MG151-97 appear active under these experimental conditions.

[0078] FIG. 25 depicts phylogenetic analysis of 2407 Retron RTs, with the first candidates selected for downstream characterization in vitro highlighted. 9 of 16 experimentally validated retrons in the literature were added and highlighted in the tree. Grey stars represent candidate MG154-MG159 and MG173 family members.

[0079] FIG. 26 depicts protein alignment of some Retron-RTs candidates selected for downstream characterization in vitro. Retron-specific motifs and the catalytic XXDD core common to all documented reverse transcriptases are indicated on the figure.

[0080] FIG. 27A depicts genomic context of the MG157-1 retron (arrow labeled RT on a thick black line). Retron non-coding RNA (ncRNA) is highlighted with a dotted box. FIG. 27B depicts an inset showing the MG157-1 retron ncRNA with it's flanking inverted repeats. FIG. 27C depicts the predicted structure of the MG157-1 retron ncRNA.

[0081] FIG. 28A depicts genomic context of the MG160-3 retron-like single-domain RT. The region upstream from the RT (dotted box) is conserved across MG160 members. FIG. 28B depicts 3D structure prediction of MG160-3 showing the RT domain aligned to a group II intron cryo-EM structure. FIG. 28C depicts predicted structures of the 5′ UTR of five MG160 members.

[0082] FIG. 29A and FIG. 29B depict screening of in vitro activity of retron-like candidates MG160-1 through MG160-6 and MG160-8 by primer extension assay. FIG. 29A lane numbers correspond to the following samples: 1-PURExpress no template control, 2-MMLV control RT, 3-TGIRT-III control RT, 4 through 10-novel candidates MG160-1 through MG160-6 and MG160-8. Numbering in bold corresponds to gel lanes with active novel candidates. FIG. 29B depicts quantification of full-length cDNA production by qPCR. Dark grey bars correspond to RTs that generate product at least 10-fold above background. Results were determined from two technical replicates. Arrows in FIG. 29A indicate full-length cDNA product (arrow near the top of the gel) and examples of cDNA drop off (lower arrows).

[0083] FIGS. 30A-30C depict cell-free expression of retron RT candidates and generation of retron ncRNAs by in vitro transcription. FIG. 30A depicts confirmation of retron RT protein production in a cell-free expression system. Lanes correspond to the following: 1: ladder, 2: no template control, 3: MG156-1 (39 kDa), 4: MG156-2 (40 kDa), 5: MG157-1 (38 kDa). FIG. 30B depicts confirmation of retron RT protein production in a cell-free expression system. Lanes correspond to the following—1: ladder, 2: no template control, 3: MG157-2 (37 kDa), 4: MG157-5 (43 kDa), 5: MG159-1 (53 kDa), 6: Ec86 (38 kDa, positive control retron RT). FIG. 30C depicts generation of retron ncRNA templates by in vitro transcription. Lanes correspond to the following ncRNAs corresponding to the following retrons—1: MG154-1, 2: MG154-2, 3: MG155-1, 4: MG155-2, 5: MG155-3, 6: MG156-1, 7: MG156-2, 8: MG157-1, 9: MG157-2, 10: MG157-5, 11: MG158-1, 12: MG159-1, 13: Ec86, 14: MG155-4, 15: MG173-1, 16: MG155-5.

[0084] FIG. 31 depicts domain architecture demonstrating that the MG140-1 R2 retrotransposon integrates into 28S rRNA gene. The R2 retrotransposase (light grey arrow) contains multiple Zn-fingers, as well as RT and endonuclease domains. MG140-1 is flanked by 5′ and 3′ UTRs, which define the transposon boundaries. MG140-1 integrates precisely between the G and T nucleotides in the target site motif GGTAGC.

[0085] FIG. 32 depicts the testing of RT activity by primer extension with DNA oligo containing phosphorothioate bond modifications. Lane numbers correspond to the following, 1: PURExpress no template control with PS-modified Primer 1, 2: PURExpress no template control with PS-modified Primer 2, 3: PURExpress no template control with PS-modified Primer 3, 4: MMLV RT with unmodified primer, 5: MMLV RT with PS-modified primer 1, 6: MMLV RT with PS-modified primer 2, 7: MMLV RT with PS-modified primer 3, 8: TGIRT-III with unmodified primer, 9: TGIRT-III with PS-modified primer 1, 10: TGIRT-III with PS-modified primer 2, 11: TGIRT-III with PS-modified primer 3, 12: MG153-9 with unmodified primer, 13: MG153-9 with PS-modified primer 1, 14: MG153-9 with PS-modified primer 2, 15 MG153-9 with PS-modified primer 3. MMLV RT and TGIRT-III are control RTs.

[0086] FIG. 33 depicts the screening of activity of retron RTs on an RNA template by primer extension assay. Lane numbers correspond to the following, 1: PURExpress no template control, 2: MMLV control RT, 3: MG154-1, 4: MG155-1, 5: MG155-2, 6: MG155-3, 7: MG156-2, 8: MG157-1, 9: MG157-2, 10: MG157-5, 11: MG158-1, 12: MG159-1, 13: Ec86 control retron RT, 14: Sa163 control retron RT, 15: St85 control retron RT. Lanes in bold correspond to novel retron RTs that exhibit primer extension activity on the tested substrate.

[0087] FIG. 34 depicts the screening of the ability of MG153 GII derived RTs to synthesize cDNA in mammalian cells. Detection of 542 bp cDNA synthesis PCR products were assayed by Taqman qPCR. cDNA activity was normalized to the activity TGIRT control where TGIRT represents a value of 1. Y axis is shown in log 10 scale.

[0088] FIGS. 35A-35C depict protein expression of MG153 GII derived RTs by immunoblots. FIGS. 35A and 35B: Cells were transfected with plasmids containing the candidate RTs and protein expression was evaluated by immunoblot, detecting the HA peptide fused to the N termini of the RTs. All lanes were normalized to total protein concentration. White arrows point to bands at 2× the expected molecular size of the protein, which indicate protein dimers. Lanes not relevant for the described experiment in FIGS. 35A and 35B are covered by black boxes. FIG. 35C: Multiple sequence alignment of GII derived RT. The region shown corresponds to positions 196 through 201 of the alignment. The dimerization motif CAQQ is highlighted.

[0089] FIG. 36 depicts relative activity of GII derived RTs normalized to protein expression. cDNA synthesis was detected by Tagman qPCR, protein expression was detected by immunoblots. Activity relative to TGIRT was normalized per total protein concentration. Y axis is shown in a linear scale.

### BRIEF DESCRIPTION OF THE SEQUENCE LISTING

[0090] The Sequence Listing filed herewith provides exemplary polynucleotide and polypeptide sequences for use in methods, compositions, and systems according to the disclosure. Below are exemplary descriptions of sequences therein.

### MG140

[0091] SEQ ID NOs: 1-29 and 393-401 show the full-length peptide sequences of MG140 transposition proteins.

[0092] SEQ ID NOs: 374-386 show the nucleotide sequences of genes encoding HA-His-tagged MG140 reverse transcriptase proteins.

[0093] SEQ ID NOs: 761-798 show the nucleotide sequences of MG140 UTRs.

[0094] SEQ ID NOs: 799-894 show the full-length peptide sequences of MG140 reverse transcriptase proteins.

### MG146

[0095] SEQ ID NOs: 402 and 895 show the full-length peptide sequences of MG140 transposition proteins.

[0096] SEQ ID NO: 387 shows the nucleotide sequence of a gene encoding an HA-His-tagged MG146 reverse transcriptase protein.

### MG147

[0097] SEQ ID NO: 388 shows the nucleotide sequence of a gene encoding an HA-His-tagged MG147 reverse transcriptase protein.

### MG148

[0098] SEQ ID NOs: 403-426 show the full-length peptide sequences of MG148 reverse transcriptase proteins.

[0099] SEQ ID NOs: 389-392 show the nucleotide sequences of genes encoding HA-His-tagged MG148 reverse transcriptase proteins.

### MG149

[0100] SEQ ID NOs: 427-439 show the full-length peptide sequences of MG149 reverse transcriptase proteins.

### MG151

[0101] SEQ ID NOs: 440-554 show the full-length peptide sequences of MG151 reverse transcriptase proteins.

[0102] SEQ ID NOs: 356-362 show the nucleotide sequences of genes encoding TwinStrep-tagged MG151 reverse transcriptase proteins.

[0103] SEQ ID NOs: 363-373 show the nucleotide sequences of genes encoding strep-tagged MG151 reverse transcriptase proteins.

### MG153

[0104] SEQ ID NOs: 555-608 show the full-length peptide sequences of MG153 reverse transcriptase proteins.

[0105] SEQ ID NOs: 30-32 and 40-50 show the nucleotide sequences of fusion proteins comprising MG153 reverse transcriptase proteins and MS2 coat proteins (MCP).

[0106] SEQ ID NOs: 66-119 show the nucleotide sequences of genes encoding strep-tagged MG153 reverse transcriptase proteins.

[0107] SEQ ID NOs: 120-173 show the nucleotide sequences of E. coli codon optimized genes encoding MG153 reverse transcriptase proteins.

[0108] SEQ ID NOs: 740-756 show the nucleotide sequences of genes encoding MCP-tagged MG153 reverse transcriptase proteins.

### MG154

[0109] SEQ ID NOs: 609-610 show the full-length peptide sequences of MG154 reverse transcriptase proteins.

[0110] SEQ ID NOs: 308-309 show the nucleotide sequences of genes encoding strep-tagged MG154 reverse transcriptase proteins.

[0111] SEQ ID NOs: 324-325 show the nucleotide sequences of E. coli codon optimized genes encoding MG154 reverse transcriptase proteins.

[0112] SEQ ID NOs: 340-341 show the nucleotide sequences of ncRNAs compatible with MG154 nucleases.

### MG155

[0113] SEQ ID NOs: 611-615 show the full-length peptide sequences of MG155 reverse transcriptase proteins.

[0114] SEQ ID NOs: 310-312 show the nucleotide sequences of genes encoding strep-tagged MG155 reverse transcriptase proteins.

[0115] SEQ ID NOs: 326-328 show the nucleotide sequences of E. coli codon optimized genes encoding MG155 reverse transcriptase proteins.

[0116] SEQ ID NOs: 342-344 show the nucleotide sequences of ncRNAs compatible with MG155 nucleases.

### MG156

[0117] SEQ ID NOs: 616-617 show the full-length peptide sequences of MG156 reverse transcriptase proteins.

[0118] SEQ ID NOs: 313-314 show the nucleotide sequences of genes encoding strep-tagged MG156 reverse transcriptase proteins.

[0119] SEQ ID NOs: 329-330 show the nucleotide sequences of E. coli codon optimized genes encoding MG156 reverse transcriptase proteins.

[0120] SEQ ID NOs: 345-346 show the nucleotide sequences of ncRNAs compatible with MG156 nucleases.

### MG157

[0121] SEQ ID NOs: 618-622 show the full-length peptide sequences of MG157 reverse transcriptase proteins.

[0122] SEQ ID NOs: 315-319 show the nucleotide sequences of genes encoding strep-tagged MG157 reverse transcriptase proteins.

[0123] SEQ ID NOs: 331-335 show the nucleotide sequences of E. coli codon optimized genes encoding MG157 reverse transcriptase proteins.

[0124] SEQ ID NOs: 347-351 show the nucleotide sequences of ncRNAs compatible with MG157 nucleases.

### MG158

[0125] SEQ ID NO: 623 shows the full-length peptide sequence of an MG158 reverse transcriptase protein.

[0126] SEQ ID NO: 320 shows the nucleotide sequence of a gene encoding a strep-tagged MG158 reverse transcriptase protein.

[0127] SEQ ID NO: 336 shows the nucleotide sequence of an E. coli codon optimized gene encoding an MG158 reverse transcriptase protein.

[0128] SEQ ID NO: 352 shows the nucleotide sequence of an ncRNA compatible with MG158 nucleases.

### MG159

[0129] SEQ ID NOs: 624-626 show the full-length peptide sequences of MG159 reverse transcriptase proteins.

[0130] SEQ ID NOs: 321-323 show the nucleotide sequences of genes encoding strep-tagged MG159 reverse transcriptase proteins.

[0131] SEQ ID NOs: 337-339 show the nucleotide sequences of E. coli codon optimized genes encoding MG159 reverse transcriptase proteins.

[0132] SEQ ID NOs: 353-355 show the nucleotide sequences of ncRNAs compatible with MG159 nucleases.

### MG160

[0133] SEQ ID NOs: 627-673 show the full-length peptide sequences of MG160 reverse transcriptase proteins.

[0134] SEQ ID NOs: 174-180 show the nucleotide sequences of genes encoding strep-tagged MG160 reverse transcriptase proteins.

[0135] SEQ ID NOs: 181-187 show the nucleotide sequences of E. coli codon genes encoding optimized MG160 reverse transcriptase proteins.

### MG163

[0136] SEQ ID NOs: 674-678 show the full-length peptide sequences of MG163 reverse transcriptase proteins.

[0137] SEQ ID NOs: 188-192 show the nucleotide sequences of genes encoding strep-tagged MG163 reverse transcriptase proteins.

[0138] SEQ ID NOs: 193-197 show the nucleotide sequences of E. coli codon genes encoding optimized MG163 reverse transcriptase proteins.

### MG164

[0139] SEQ ID NOs: 679-683 show the full-length peptide sequences of MG164 reverse transcriptase proteins.

[0140] SEQ ID NOs: 198-202 show the nucleotide sequences of genes encoding strep-tagged MG164 reverse transcriptase proteins.

[0141] SEQ ID NOs: 203-207 show the nucleotide sequences of E. coli codon genes encoding optimized MG164 reverse transcriptase proteins.

### MG165

[0142] SEQ ID NOs: 684-692 show the full-length peptide sequences of MG165 reverse transcriptase proteins.

[0143] SEQ ID NOs: 208-216 show the nucleotide sequences of genes encoding strep-tagged MG165 reverse transcriptase proteins.

[0144] SEQ ID NOs: 217-225 show the nucleotide sequences of E. coli codon genes encoding optimized MG165 reverse transcriptase proteins.

[0145] SEQ ID NOs: 757-759 show the nucleotide sequences of genes encoding MCP-tagged MG165 reverse transcriptase proteins.

### MG166

[0146] SEQ ID NOs: 693-697 show the full-length peptide sequences of MG166 reverse transcriptase proteins.

[0147] SEQ ID NOs: 226-230 show the nucleotide sequences of genes encoding strep-tagged MG166 reverse transcriptase proteins.

[0148] SEQ ID NOs: 231-235 show the nucleotide sequences of E. coli codon genes encoding optimized MG166 reverse transcriptase proteins.

### MG167

[0149] SEQ ID NOs: 698-702 show the full-length peptide sequences of MG167 reverse transcriptase proteins.

[0150] SEQ ID NOs: 236-240 show the nucleotide sequences of genes encoding strep-tagged MG167 reverse transcriptase proteins.

[0151] SEQ ID NOs: 241-245 show the nucleotide sequences of E. coli codon genes encoding optimized MG167 reverse transcriptase proteins.

[0152] SEQ ID NOs: 759-760 show the nucleotide sequences of genes encoding MCP-tagged MG167 reverse transcriptase proteins.

### MG168

[0153] SEQ ID NOs: 703-707 show the full-length peptide sequences of MG168 reverse transcriptase proteins.

[0154] SEQ ID NOs: 246-250 show the nucleotide sequences of genes encoding strep-tagged MG168 reverse transcriptase proteins.

[0155] SEQ ID NOs: 251-255 show the nucleotide sequences of E. coli codon genes encoding optimized MG168 reverse transcriptase proteins.

### MG169

[0156] SEQ ID NOs: 708-718 show the full-length peptide sequences of MG169 reverse transcriptase proteins.

[0157] SEQ ID NOs: 256-266 show the nucleotide sequences of genes encoding strep-tagged MG169 reverse transcriptase proteins.

[0158] SEQ ID NOs: 267-277 show the nucleotide sequences of E. coli codon genes encoding optimized MG169 reverse transcriptase proteins.

### MG170

[0159] SEQ ID NOs: 719-728 show the full-length peptide sequences of MG170 reverse transcriptase proteins.

[0160] SEQ ID NOs: 278-287 show the nucleotide sequences of genes encoding strep-tagged MG170 reverse transcriptase proteins.

[0161] SEQ ID NOs: 288-297 show the nucleotide sequences of E. coli codon genes encoding optimized MG170 reverse transcriptase proteins.

### MG172

[0162] SEQ ID NOs: 729-733 show the full-length peptide sequences of MG172 reverse transcriptase proteins.

[0163] SEQ ID NOs: 298-302 show the nucleotide sequences of genes encoding strep-tagged MG172 reverse transcriptase proteins.

[0164] SEQ ID NOs: 303-307 show the nucleotide sequences of E. coli codon genes encoding optimized MG172 reverse transcriptase proteins.

### MG173

[0165] SEQ ID NOs: 734-735 show the full-length peptide sequences of MG173 reverse transcriptase proteins.

### Other Sequences

[0166] SEQ ID NOs: 736-738 show the nucleotide sequences of phosphorothioate-modified primers.

[0167] SEQ ID NO: 739 shows the nucleotide sequence of a Tagman probe for qPCR.

### DETAILED DESCRIPTION

[0168] While various embodiments of the invention have been shown and described herein, it will be obvious to those skilled in the art that such embodiments are provided by way of example only. Numerous variations, changes, and substitutions may occur to those skilled in the art without departing from the invention. It should be understood that various alternatives to the embodiments of the invention described herein may be employed.

[0169] The practice of some methods disclosed herein employ, unless otherwise indicated, techniques of immunology, biochemistry, chemistry, molecular biology, microbiology, cell biology, genomics, and recombinant DNA. See for example Sambrook and Green, Molecular Cloning: A Laboratory Manual, 4th Edition (2012); the series Current Protocols in Molecular Biology (F. M. Ausubel, et al. eds.); the series Methods In Enzymology (Academic Press, Inc.), PCR 2: A Practical Approach (M. J. MacPherson, B. D. Hames and G. R. Taylor eds. (1995)), Harlow and Lane, eds. (1988) Antibodies, A Laboratory Manual, and Culture of Animal Cells: A Manual of Basic Technique and Specialized Applications, 6th Edition (R. I. Freshney, ed. (2010)) (which is entirely incorporated by reference herein).

[0170] As used herein, the singular forms “a”, “an” and “the” are intended to include the plural forms as well, unless the context clearly indicates otherwise. Furthermore, to the extent that the terms “including”, “includes”, “having”, “has”, “with”, or variants thereof are used in either the detailed description and/or the claims, such terms are intended to be inclusive in a manner similar to the term “comprising”.

[0171] The term “about” or “approximately” means within an acceptable error range for the particular value as determined by one of ordinary skill in the art, which will depend in part on how the value is measured or determined, e.g., the limitations of the measurement system. For example, “about” can mean within one or more than one standard deviation, per the practice in the art. Alternatively, “about” can mean a range of up to 20%, up to 15%, up to 10%, up to 5%, or up to 1% of a given value.

[0172] As used herein, a “cell” generally refers to a biological cell. A cell may be the basic structural, functional, or biological unit of a living organism. A cell may originate from any organism having one or more cells. Some non-limiting examples include: a prokaryotic cell, eukaryotic cell, a bacterial cell, an archaeal cell, a cell of a single-cell eukaryotic organism, a protozoa cell, a cell from a plant (e.g., cells from plant crops, fruits, vegetables, grains, soy bean, corn, maize, wheat, seeds, tomatoes, rice, cassava, sugarcane, pumpkin, hay, potatoes, cotton, cannabis, tobacco, flowering plants, conifers, gymnosperms, ferns, clubmosses, hornworts, liverworts, mosses), an algal cell, (e.g., Botryococcus braunii, Chlamydomonas reinhardtii, Nannochloropsis gaditana, Chlorella pyrenoidosa, Sargassum patens C. Agardh, and the like), seaweeds (e.g., kelp), a fungal cell (e.g., a yeast cell, a cell from a mushroom), an animal cell, a cell from an invertebrate animal (e.g., fruit fly, cnidarian, echinoderm, nematode, etc.), a cell from a vertebrate animal (e.g., fish, amphibian, reptile, bird, mammal), a cell from a mammal (e.g., a pig, a cow, a goat, a sheep, a rodent, a rat, a mouse, a non-human primate, a human, etc.), and etcetera. Sometimes a cell is not originating from a natural organism (e.g., a cell can be a synthetically made, sometimes termed an artificial cell).

[0173] The term “nucleotide,” as used herein, generally refers to a base-sugar-phosphate combination. A nucleotide may comprise a synthetic nucleotide. A nucleotide may comprise a synthetic nucleotide analog. Nucleotides may be monomeric units of a nucleic acid sequence (e.g., deoxyribonucleic acid (DNA) and ribonucleic acid (RNA)). The term nucleotide may include ribonucleoside triphosphates adenosine triphosphate (ATP), uridine triphosphate (UTP), cytosine triphosphate (CTP), guanosine triphosphate (GTP) and deoxyribonucleoside triphosphates such as dATP, dCTP, dITP, dUTP, dGTP, dTTP, or derivatives thereof. Such derivatives may include, for example, [αS]dATP, 7-deaza-dGTP and 7-deaza-dATP, and nucleotide derivatives that confer nuclease resistance on the nucleic acid molecule containing them. The term nucleotide as used herein may refer to dideoxyribonucleoside triphosphates (ddNTPs) and their derivatives. Illustrative examples of dideoxyribonucleoside triphosphates may include, but are not limited to, ddATP, ddCTP, ddGTP, ddITP, and ddTTP. A nucleotide may be unlabeled or detectably labeled, such as using moieties comprising optically detectable moieties (e.g., fluorophores). Labeling may also be carried out with quantum dots. Detectable labels may include, for example, radioactive isotopes, fluorescent labels, chemiluminescent labels, bioluminescent labels, and enzyme labels. Fluorescent labels of nucleotides may include but are not limited fluorescein, 5-carboxyfluorescein (FAM), 2′7′-dimethoxy-4′5-dichloro-6-carboxyfluorescein (JOE), rhodamine, 6-carboxyrhodamine (R6G), N,N,N′,N′-tetramethyl-6-carboxyrhodamine (TAMRA), 6-carboxy-X-rhodamine (ROX), 4-(4′dimethylaminophenylazo) benzoic acid (DABCYL), Cascade Blue, Oregon Green, Texas Red, Cyanine and 5-(2′-aminoethyl)aminonaphthalene-1-sulfonic acid (EDANS). Specific examples of fluorescently labeled nucleotides can include [R6G]dUTP, [TAMRA]dUTP, [R110]dCTP, [R6G]dCTP, [TAMRA]dCTP, [JOE]ddATP, [R6G]ddATP, [FAM]ddCTP, [R110]ddCTP, [TAMRA]ddGTP, [ROX]ddTTP, [dR6G]ddATP, [dR110]ddCTP, [dTAMRA]ddGTP, and [dROX]ddTTP available from Perkin Elmer, Foster City, Calif; FluoroLink DeoxyNucleotides, FluoroLink Cy3-dCTP, FluoroLink Cy5-dCTP, FluoroLink Fluor X-dCTP, FluoroLink Cy3-dUTP, and FluoroLink Cy5-dUTP available from Amersham, Arlington Heights, Il.; Fluorescein-15-dATP, Fluorescein-12-dUTP, Tetramethyl-rodamine-6-dUTP, IR770-9-dATP, Fluorescein-12-ddUTP, Fluorescein-12-UTP, and Fluorescein-15-2′-dATP available from Boehringer Mannheim, Indianapolis, Ind.; and Chromosome Labeled Nucleotides, BODIPY-FL-14-UTP, BODIPY-FL-4-UTP, BODIPY-TMR-14-UTP, BODIPY-TMR-14-dUTP, BODIPY-TR-14-UTP, BODIPY-TR-14-dUTP, Cascade Blue-7-UTP, Cascade Blue-7-dUTP, fluorescein-12-UTP, fluorescein-12-dUTP, Oregon Green 488-5-dUTP, Rhodamine Green-5-UTP, Rhodamine Green-5-dUTP, tetramethylrhodamine-6-UTP, tetramethylrhodamine-6-dUTP, Texas Red-5-UTP, Texas Red-5-dUTP, and Texas Red-12-dUTP available from Molecular Probes, Eugene, Oreg. Nucleotides can also be labeled or marked by chemical modification. A chemically-modified single nucleotide can be biotin-dNTP. Some non-limiting examples of biotinylated dNTPs can include, biotin-dATP (e.g., bio-N6-ddATP, biotin-14-dATP), biotin-dCTP (e.g., biotin-11-dCTP, biotin-14-dCTP), and biotin-dUTP (e.g., biotin-11-dUTP, biotin-16-dUTP, biotin-20-dUTP).

[0174] The terms “polynucleotide,” “oligonucleotide,” and “nucleic acid” are used interchangeably to generally refer to a polymeric form of nucleotides of any length, either deoxyribonucleotides or ribonucleotides, or analogs thereof, either in single-, double-, or multi-stranded form. A polynucleotide may be exogenous or endogenous to a cell. A polynucleotide may exist in a cell-free environment. A polynucleotide may be a gene or fragment thereof. A polynucleotide may be DNA. A polynucleotide may be RNA. A polynucleotide may have any three-dimensional structure and may perform any function. A polynucleotide may comprise one or more analogs (e.g., altered backbone, sugar, or nucleobase). If present, modifications to the nucleotide structure may be imparted before or after assembly of the polymer. Some non-limiting examples of analogs include: 5-bromouracil, peptide nucleic acid, xeno nucleic acid, morpholinos, locked nucleic acids, glycol nucleic acids, threose nucleic acids, dideoxynucleotides, cordycepin, 7-deaza-GTP, fluorophores (e.g., rhodamine or fluorescein linked to the sugar), thiol-containing nucleotides, biotin-linked nucleotides, fluorescent base analogs, CpG islands, methyl-7-guanosine, methylated nucleotides, inosine, thiouridine, pseudouridine, dihydrouridine, queuosine, and wyosine. Non-limiting examples of polynucleotides include coding or non-coding regions of a gene or gene fragment, loci (locus) defined from linkage analysis, exons, introns, messenger RNA (mRNA), transfer RNA (tRNA), ribosomal RNA (rRNA), short interfering RNA (siRNA), short-hairpin RNA (shRNA), micro-RNA (miRNA), ribozymes, cDNA, recombinant polynucleotides, branched polynucleotides, plasmids, vectors, isolated DNA of any sequence, isolated RNA of any sequence, cell-free polynucleotides including cell-free DNA (cfDNA) and cell-free RNA (cfRNA), nucleic acid probes, and primers. The sequence of nucleotides may be interrupted by non-nucleotide components.

[0175] The terms “transfection” or “transfected” generally refer to introduction of a nucleic acid into a cell by non-viral or viral-based methods. The nucleic acid molecules may be gene sequences encoding complete proteins or functional portions thereof. See, e.g., Sambrook et al., 1989, Molecular Cloning: A Laboratory Manual, 18.1-18.88 (which is entirely incorporated by reference herein).

[0176] The terms “peptide,” “polypeptide,” and “protein” are used interchangeably herein to generally refer to a polymer of at least two amino acid residues joined by peptide bond(s). This term does not connote a specific length of polymer, nor is it intended to imply or distinguish whether the peptide is produced using recombinant techniques, chemical or enzymatic synthesis, or is naturally occurring. The terms apply to naturally occurring amino acid polymers as well as amino acid polymers comprising at least one modified amino acid. In some embodiments, the polymer may be interrupted by non-amino acids. The terms include amino acid chains of any length, including full length proteins, and proteins with or without secondary or tertiary structure (e.g., domains). The terms also encompass an amino acid polymer that has been modified, for example, by disulfide bond formation, glycosylation, lipidation, acetylation, phosphorylation, oxidation, and any other manipulation such as conjugation with a labeling component. The terms “amino acid” and “amino acids,” as used herein, generally refer to natural and non-natural amino acids, including, but not limited to, modified amino acids and amino acid analogues. Modified amino acids may include natural amino acids and non-natural amino acids, which have been chemically modified to include a group or a chemical moiety not naturally present on the amino acid. Amino acid analogues may refer to amino acid derivatives. The term “amino acid” includes both D-amino acids and L-amino acids.

[0177] As used herein, the “non-native” can generally refer to a nucleic acid or polypeptide sequence that is not found in a native nucleic acid or protein. Non-native may refer to affinity tags. Non-native may refer to fusions. Non-native may refer to a naturally occurring nucleic acid or polypeptide sequence that comprises mutations, insertions, or deletions. A non-native sequence may exhibit or encode for an activity (e.g., enzymatic activity, methyltransferase activity, acetyltransferase activity, kinase activity, ubiquitinating activity, etc.) that may also be exhibited by the nucleic acid or polypeptide sequence to which the non-native sequence is fused. A non-native nucleic acid or polypeptide sequence may be linked to a naturally-occurring nucleic acid or polypeptide sequence (or a variant thereof) by genetic engineering to generate a chimeric nucleic acid or polypeptide sequence encoding a chimeric nucleic acid or polypeptide.

[0178] The term “promoter”, as used herein, generally refers to the regulatory DNA region which controls transcription or expression of a gene, and which may be located adjacent to or overlapping a nucleotide or region of nucleotides at which RNA transcription is initiated. A promoter may contain specific DNA sequences which bind protein factors, often referred to as transcription factors, which facilitate binding of RNA polymerase to the DNA leading to gene transcription. A ‘basal promoter’, also referred to as a ‘core promoter’, may generally refer to a promoter that contains all the basic elements to promote transcriptional expression of an operably linked polynucleotide. Eukaryotic basal promoters can contain a TATA-box or a CAAT box.

[0179] The term “expression”, as used herein, generally refers to the process by which a nucleic acid sequence or a polynucleotide is transcribed from a DNA template (such as into mRNA or other RNA transcript) or the process by which a transcribed mRNA is subsequently translated into peptides, polypeptides, or proteins. Transcripts and encoded polypeptides may be collectively referred to as “gene product.” If the polynucleotide is derived from genomic DNA, expression may include splicing of the mRNA in a eukaryotic cell.

[0180] As used herein, “operably linked”, “operable linkage”, “operatively linked”, or grammatical equivalents thereof generally refer to juxtaposition of genetic elements, e.g., a promoter, an enhancer, a polyadenylation sequence, etc., wherein the elements are in a relationship permitting them to operate in the expected manner. For instance, a regulatory element, which may comprise promoter or enhancer sequences, is operatively linked to a coding region if the regulatory element helps initiate transcription of the coding sequence. There may be intervening residues between the regulatory element and coding region so long as this functional relationship is maintained.

[0181] A “vector” as used herein, generally refers to a macromolecule or association of macromolecules that comprises or associates with a polynucleotide and which may be used to mediate delivery of the polynucleotide to a cell. Examples of vectors include plasmids, viral vectors, liposomes, and other gene delivery vehicles. The vector generally comprises genetic elements, e.g., regulatory elements, operatively linked to a gene to facilitate expression of the gene in a target.

[0182] As used herein, “an expression cassette” and “a nucleic acid cassette” are used interchangeably generally to refer to a combination of nucleic acid sequences or elements that are expressed together or are operably linked for expression. In some embodiments, an expression cassette refers to the combination of regulatory elements and a gene or genes to which they are operably linked for expression.

[0183] A “functional fragment” of a DNA or protein sequence generally refers to a fragment that retains a biological activity (either functional or structural) that is substantially similar to a biological activity of the full-length DNA or protein sequence. A biological activity of a DNA sequence may be its ability to influence expression in a manner attributed to the full-length sequence.

[0184] As used herein, an “engineered” object generally indicates that the object has been modified by human intervention. According to non-limiting examples: a nucleic acid may be modified by changing its sequence to a sequence that does not occur in nature; a nucleic acid may be modified by ligating it to a nucleic acid that it does not associate with in nature such that the ligated product possesses a function not present in the original nucleic acid; an engineered nucleic acid may synthesized in vitro with a sequence that does not exist in nature; a protein may be modified by changing its amino acid sequence to a sequence that does not exist in nature; an engineered protein may acquire a new function or property. An “engineered” system comprises at least one engineered component.

[0185] As used herein, “synthetic” and “artificial” can generally be used interchangeably to refer to a protein or a domain thereof that has low sequence identity (e.g., less than 50% sequence identity, less than 25% sequence identity, less than 10% sequence identity, less than 5% sequence identity, less than 1% sequence identity) to a naturally occurring human protein. For example, VPR and VP64 domains are synthetic transactivation domains.

[0186] As used herein, the term “transposable element” refers to a DNA sequence that can move from one location in the genome to another (e.g., they can be “transposed”). Transposable elements can be generally divided into two classes. Class I transposable elements, or “retrotransposons”, are transposed via transcription and translation of an RNA intermediate which is subsequently reincorporated into its new location into the genome via reverse transcription (a process mediated by a reverse transcriptase). Class II transposable elements, or “DNA transposons”, are transposed via a complex of single- or double-stranded DNA flanked on either side by a transposase. Further features of this family of enzymes can be found, e.g. in Nature Education 2008, 1 (1), 204; and Genome Biology 2018, 19 (199), 1-12; each of which is incorporated herein by reference.

[0187] As used herein, the term “retrotransposons” refers to Class I transposable elements that function according to a two-part “copy and paste” mechanism involving an RNA intermediate. “Retrotransposase” refers to an enzyme responsible for transposition of a retrotransposon. In some embodiments, a retrotransposase comprises a reverse transcriptase domain. In some embodiments, a retrotransposase further comprises one or more zinc finger domains. In some embodiments, a retrotransposase further comprises an endonuclease domain.

[0188] The term “sequence identity” or “percent identity” in the context of two or more nucleic acids or polypeptide sequences, generally refers to two (e.g., in a pairwise alignment) or more (e.g., in a multiple sequence alignment) sequences that are the same or have a specified percentage of amino acid residues or nucleotides that are the same, when compared and aligned for maximum correspondence over a local or global comparison window, as measured using a sequence comparison algorithm. Suitable sequence comparison algorithms for polypeptide sequences include, e.g., BLASTP using parameters of a wordlength (W) of 3, an expectation (E) of 10, and the BLOSUM62 scoring matrix setting gap costs at existence of 11, extension of 1, and using a conditional compositional score matrix adjustment for polypeptide sequences longer than 30 residues; BLASTP using parameters of a wordlength (W) of 2, an expectation (E) of 1000000, and the PAM30 scoring matrix setting gap costs at 9 to open gaps and 1 to extend gaps for sequences of less than 30 residues (these are the default parameters for BLASTP in the BLAST suite available at https://blast.ncbi.nlm.nih.gov); CLUSTALW with the Smith-Waterman homology search algorithm parameters with a match of 2, a mismatch of −1, and a gap of −1; MUSCLE with default parameters; MAFFT with parameters of a retree of 2 and max iterations of 1000; Novafold with default parameters; HMMER hmmalign with default parameters.

[0189] The term “optimally aligned” in the context of two or more nucleic acids or polypeptide sequences, generally refers to two (e.g., in a pairwise alignment) or more (e.g., in a multiple sequence alignment) sequences that have been aligned to maximal correspondence of amino acids residues or nucleotides, for example, as determined by the alignment producing a highest or “optimized” percent identity score.

[0190] The term “open reading frame” or “ORF” generally refers to a nucleotide sequence that can encode a protein, or a portion of a protein. An open reading frame can begin with a start codon (represented as, e.g. AUG for an RNA molecule and ATG in a DNA molecule in the standard code) and can be read in codon-triplets until the frame ends with a STOP codon (represented as, e.g. UAA, UGA, or UAG for an RNA molecule and TAA, TGA, or TAG in a DNA molecule in the standard code).

[0191] Included in the current disclosure are variants of any of the enzymes described herein with one or more conservative amino acid substitutions. Such conservative substitutions can be made in the amino acid sequence of a polypeptide without disrupting the three-dimensional structure or function of the polypeptide. Conservative substitutions can be accomplished by substituting amino acids with similar hydrophobicity, polarity, and R chain length for one another. Additionally, or alternatively, by comparing aligned sequences of homologous proteins from different species, conservative substitutions can be identified by locating amino acid residues that have been mutated between species (e.g., non-conserved residues) without altering the basic functions of the encoded proteins. Such conservatively substituted variants may include variants with at least about 20%, at least about 25%, at least about 30%, at least about 35%, at least about 40%, at least about 45%, at least about 50%, at least about 55%, at least about 60%, at least about 65%, at least about 70%, at least about 75%, at least about 80%, at least about 85%, at least about 86%, at least about 87%, at least about 88%, at least about 89%, at least about 90%, at least about 91%, at least about 92%, at least about 93%, at least about 94%, at least about 95%, at least about 96%, at least about 97%, at least about 98%, at least about 99%, or 100% sequence identity to any one of the retrotransposase protein sequences described herein (e.g. MG140 family retrotransposases described herein, or any other family retrotransposase described herein). In some embodiments, such conservatively substituted variants are functional variants. Such functional variants can encompass sequences with substitutions such that the activity of one or more critical active site residues of the retrotransposase are not disrupted. In some embodiments, a functional variant of any of the proteins described herein lacks substitution of at least one of the conserved or functional residues called out in FIG. 2A and FIG. 2B. In some embodiments, a functional variant of any of the proteins described herein lacks substitution of all of the conserved or functional residues called out in FIG. 2A and FIG. 2B.

[0192] Also included in the current disclosure are variants of any of the enzymes described herein with substitution of one or more catalytic residues to decrease or eliminate activity of the enzyme (e.g. decreased-activity variants). In some embodiments, a decreased activity variant as a protein described herein comprises a disrupting substitution of at least one, at least two, or all three catalytic residues called out in FIG. 2A and FIG. 2B.

[0193] Conservative substitution tables providing functionally similar amino acids are available from a variety of references (see, for e.g., Creighton, Proteins: Structures and Molecular Properties (W H Freeman & Co.; 2nd edition (December 1993)). The following eight groups each contain amino acids that are conservative substitutions for one another: 1) Alanine (A), Glycine (G);
[0194] 2) Aspartic acid (D), Glutamic acid (E);
[0195] 3) Asparagine (N), Glutamine (Q);
[0196] 4) Arginine (R), Lysine (K);
[0197] 5) Isoleucine (I), Leucine (L), Methionine (M), Valine (V);
[0198] 6) Phenylalanine (F), Tyrosine (Y), Tryptophan (W);
[0199] 7) Serine (S), Threonine (T); and
[0200] 8) Cysteine (C), Methionine (M).

[0201] Also included in the current disclosure are variants of any of the nucleic acid sequences described herein with one or more substitutions, deletions, or insertions. In some embodiments, such a variant has at least about 80%, at least about 81%, at least about 82%, at least about 83%, at least about 84%, at least about 85%, at least about 86%, at least about 87%, at least about 88%, at least about 89%, at least about 90%, at least about 91%, at least about 92%, at least about 93%, at least about 94%, at least about 95%, at least about 96%, at least about 97%, at least about 98%, at least about 99%, or 100% sequence identity to any one of the nucleic acid sequences described herein.

[0202] Some of the protein sequences described herein involve the determination of a particular domain (e.g. a reverse transcriptase or RT domain) from the sequence of a selected larger protein (e.g. a retrotransposase). In such cases, multiple sequence alignments (MSA) with a reference larger protein (e.g. a retrotransposase) where the domains have been validated (e.g. with 3D structures) is used to identify domain boundaries by aligning the selected protein to the larger protein with validated domains. When MSAs are inconclusive because the sequences are so divergent, 3D structures of the larger proteins are determined and the structural domains are compared with known domains to define the boundaries. These boundaries can be further verified by ensuring the presence of important catalytic residues for the domain within the domain boundaries.

[0203] As used herein, the term “LINE retrotransposase” generally refers to a class of autonomous non-LTR retrotransposons (Long INterspersed Element). As used herein, the term “R2 retrotransposase” or “R4 retrotransposase” generally refer to subclasses of LINE retrotransposases that share similar domain architecture but differ in that R2 retrotransposases can be site specific (e.g. integrating at specific sites of an rRNA gene) while R4 retrotransposons can integrate both at an rRNA gene as well as other non-specific sites containing repeats.

### Overview

[0204] The discovery of new transposable elements with unique functionality and structure may offer the potential to further disrupt deoxyribonucleic acid (DNA) editing technologies, improving speed, specificity, functionality, and ease of use. Relative to the predicted prevalence of transposable elements in microbes and the sheer diversity of microbial species, relatively few functionally characterized transposable elements exist in the literature. This is partly because a huge number of microbial species may not be readily cultivated in laboratory conditions.

[0205] Metagenomic sequencing from natural environmental niches containing large numbers of microbial species can offer the potential to drastically increase the number of new transposable elements documented and speed the discovery of new oligonucleotide editing functionalities.

[0206] Transposable elements are deoxyribonucleic acid sequences that can change position within a genome, often resulting in the generation or amelioration of mutations. In eukaryotes, a great proportion of the genome, and a large share of the mass of cellular DNA, is attributable to transposable elements. Although transposable elements are “selfish genes” which propagate themselves at the expense of other genes, they have been found to serve various important functions and to be crucial to genome evolution. Based on their mechanism, transposable elements are classified as either Class I “retrotransposons” or Class II “DNA transposons”.

[0207] Class I transposable elements, also referred to as retrotransposons, function according to a two-part “copy and paste” mechanism involving an RNA intermediate. First, the retrotransposon is transcribed. The resulting RNA is subsequently converted back to DNA by reverse transcriptase (generally encoded by the retrotransposon itself), and the reverse transcribed retrotransposon is integrated into its new position in the genome by integrase. Retrotransposons are further classified into three orders. Retrotransposons with long terminal repeats (“LTRs”) encode reverse transcriptase and are flanked by long strands of repeating DNA. Retrotransposons with long interspersed nuclear elements (“LINEs”) encode reverse transcriptase, lack LTRs, and are transcribed by RNA polymerase II. Retrotransposons with short interspersed nuclear elements (“SINEs”) are transcribed by RNA polymerase III but lack reverse transcriptase, instead relying on the reverse transcription machinery of other transposable elements (e.g. LINEs).

[0208] Class II transposable elements, also referred to as DNA transposons, function according to mechanisms that do not involve an RNA intermediate. Many DNA transposons display a “cut and paste” mechanism in which transposase binds terminal inverted repeats (“TIRs”) flanking the transposon, cleaves the transposon from the donor region, and inserts it into the target region of the genome. Others, referred to as “helitrons”, display a “rolling circle” mechanism involving a single-stranded DNA intermediate and mediated by an undocumented protein understood to possess HUH endonuclease function and 5′ to 3′ helicase activity. First, a circular strand of DNA is nicked to create two single DNA strands. The protein remains attached to the 5′ phosphate of the nicked strand, leaving the 3′ hydroxyl end of the complementary strand exposed and thus allowing a polymerase to replicate the non-nicked strand. Once replication is complete, the new strand disassociates and is itself replicated along with the original template strand. Still other DNA transposons, “Polintons”, are theorized to undergo a “self-synthesis” mechanism. The transposition is initiated by an integrase's excision of a single-stranded extra-chromosomal Polinton element, which forms a racket-like structure. The Polinton undergoes replication with DNA polymerase B, and the double stranded Polinton is inserted into the genome by the integrase. Additionally, some DNA transposons, such as those in the IS200/IS605 family, proceed via a “peel and paste” mechanism in which TnpA excises a piece of single-stranded DNA (as a circular “transposon joint”) from the lagging strand template of the donor gene and reinserts it into the replication fork of the target gene.

[0209] While transposable elements have found some use as biological tools, documented transposable elements do not encompass the full range of possible biodiversity and targetability, and may not represent all possible activities. Here, thousands of genomic fragments were mined from numerous metagenomes for transposable elements. The documented diversity of transposable elements may have been expanded and novel systems may have been developed into highly targetable, compact, and precise gene editing agents.

### MG Enzymes

[0210] In some aspects, the present disclosure provides for novel retrotransposases. These candidates may represent one or more novel subtypes and some sub-families may have been identified. These retrotransposases are less than about 1,400 amino acids in length. These retrotransposases may simplify delivery and may extend therapeutic applications.

[0211] In some aspects, the present disclosure provides for a novel retrotransposase. Such a retrotransposase may be MG140 as described herein (see FIGS. 1 and 2).

[0212] In one aspect, the present disclosure provides for an engineered retrotransposase system discovered through metagenomic sequencing. In some embodiments, the metagenomic sequencing is conducted on samples. In some embodiments, the samples may be collected from a variety of environments. Such environments may be a human microbiome, an animal microbiome, environments with high temperatures, environments with low temperatures. Such environments may include sediment.

[0213] In one aspect, the present disclosure provides for an engineered retrotransposase system comprising a retrotransposase. In some embodiments, the retrotransposase is derived from an uncultivated microorganism. The retrotransposase may be configured to bind a 3′ untranslated region (UTR). The retrotransposase may bind a 5′ untranslated region (UTR).

[0214] In one aspect, the present disclosure provides for an engineered retrotransposase system comprising a retrotransposase. In some embodiments, the retrotransposase comprises a sequence having at least about 70% sequence identity to any one of SEQ ID NOs: 1-29, 393-735, or 799-895. In some embodiments, the retrotransposase comprises a sequence having at least about 20%, at least about 25%, at least about 30%, at least about 35%, at least about 40%, at least about 45%, at least about 50%, at least about 55%, at least about 60%, at least about 65%, at least about 70%, at least about 75%, at least about 80%, at least about 85%, at least about 90%, at least about 91%, at least about 92%, at least about 93%, at least about 94%, at least about 95%, at least about 96%, at least about 97%, at least about 98%, or at least about 99% sequence identity to any one of SEQ ID NOs: 1-29, 393-735, or 799-895.

[0215] In some embodiments, the retrotransposase comprises a variant having at least about 20%, at least about 25%, at least about 30%, at least about 35%, at least about 40%, at least about 45%, at least about 50%, at least about 55%, at least about 60%, at least about 65%, at least about 70%, at least about 75%, at least about 80%, at least about 85%, at least about 90%, at least about 91%, at least about 92%, at least about 93%, at least about 94%, at least about 95%, at least about 96%, at least about 97%, at least about 98%, or at least about 99% sequence identity to any one of SEQ ID NOs: 1-29, 393-735, or 799-895. In some embodiments, the retrotransposase may be substantially identical to any one of SEQ ID NOs: 1-29, 393-735, or 799-895.

[0216] In some embodiments, the retrotransposase comprises a reverse transcriptase domain. In some embodiments, the retrotransposase further comprises one or more zinc finger domains. In some embodiments, the retrotransposase further comprises an endonuclease finger domain.

[0217] In some embodiments, the retrotransposase has less than about 90%, less than about 85%, less than about 80%, less than about 75%, less than about 70%, less than about 65%, less than about 60%, less than about 55%, less than about 50%, less than about 45%, less than about 40%, less than about 35%, less than about 30%, less than about 25%, less than about 20%, less than about 15%, less than about 10%, or less than about 5% sequence identity to a documented retrotransposase.

[0218] In some embodiments, the cargo nucleotide sequence is flanked by a 3′ untranslated region (UTR) and a 5′ untranslated region (UTR).

[0219] In some embodiments, the retrotransposase is configured to transpose the cargo nucleotide sequence as single-stranded deoxyribonucleic acid polynucleotide. In some embodiments, the retrotransposase is configured to transpose the cargo nucleotide sequence as double-stranded deoxyribonucleic acid polynucleotide. In some embodiments, the retrotransposase is configured to transpose said cargo nucleotide sequence via a ribonucleic acid polynucleotide intermediate.

[0220] In some embodiments, the retrotransposase comprises a sequence complementary to a eukaryotic, fungal, plant, mammalian, or human genomic polynucleotide sequence. In some embodiments, the retrotransposase comprises a sequence complementary to a eukaryotic genomic polynucleotide sequence. In some embodiments, the retrotransposase comprises a sequence complementary to a fungal genomic polynucleotide sequence. In some embodiments, the retrotransposase comprises a sequence complementary to a plant genomic polynucleotide sequence. In some embodiments, the retrotransposase comprises a sequence complementary to a mammalian genomic polynucleotide sequence. In some embodiments, the retrotransposase comprises a sequence complementary to a human genomic polynucleotide sequence.

[0221] In some embodiments, the retrotransposase may comprise a variant having one or more nuclear localization sequences (NLSs). The NLS may be proximal to the N- or C-terminus of the retrotransposase. The NLS may be appended N-terminal or C-terminal to any one of SEQ ID NOs: 896-911, or to a variant having at least about 20%, at least about 25%, at least about 30%, at least about 35%, at least about 40%, at least about 45%, at least about 50%, at least about 55%, at least about 60%, at least about 65%, at least about 70%, at least about 75%, at least about 80%, at least about 85%, at least about 90%, at least about 91%, at least about 92%, at least about 93%, at least about 94%, at least about 95%, at least about 96%, at least about 97%, at least about 98%, or at least about 99% sequence identity to any one of SEQ ID NOs: 896-911. In some embodiments, the NLS may comprise a sequence substantially identical to any one of SEQ ID NOs: 896-911. In some embodiments, the NLS may comprise a sequence substantially identical to SEQ ID NO: 896. In some embodiments, the NLS may comprise a sequence substantially identical to SEQ ID NO: 897.

TABLE 1
Example NLS Sequences that may be used with retrotransposases according to the
disclosure

| Source | NLS amino acid sequence | SEQ ID NO: |
|---|---|---|
| SV40 | PKKKRKV | 896 |
| nucleoplasmin | KRPAATKKAGQAKKKK | 897 |
| bipartite NLS | | |
| c-myc NLS | PAAKRVKLD | 898 |
| c-myc NLS | RQRRNELKRSP | 899 |
| hRNPA1 M9 NLS | NQSSNFGPMKGGNFGGRSSGPYGGGGQYFAKPRNQGGY | 900 |
| Importin-alpha IBB | RMRIZFKNKGKDTAELRRRRVEVSVELRKAKKDEQILKRRNV | 901 |
| domain | | |
| Myoma T protein | VSRKRPRP | 902 |
| Myoma T protein | PPKKARED | 903 |
| p53 | PQPKKKPL | 904 |
| mouse c-abl IV | SALIKKKKKMAP | 905 |
| influenza virus NS1 | DRLRR | 906 |
| influenza virus NS1 | PKQKKRK | 907 |
| Hepatitis virus delta | RKLKKKIKKL | 908 |
| antigen | | |
| mouse Mx1 protein | REKKKELKRR | 909 |
| human poly (ADP- | KRKGDEVDGVDEVAKKKSKK | 910 |
| ribose) polymerase | | |
| steroid hormone | RKCLQAGMNLEARKTKK | 911 |
| receptors (human) | | |
| glucocorticoid | | |

[0222] In some embodiments, sequence may be determined by a BLASTP, CLUSTALW, MUSCLE, or MAFFT algorithm, or a CLUSTALW algorithm with the Smith-Waterman homology search algorithm parameters. The sequence identity may be determined by the BLASTP homology search algorithm using parameters of a wordlength (W) of 3, an expectation (E) of 10, and a BLOSUM62 scoring matrix setting gap costs at existence of 11, extension of 1, and using a conditional compositional score matrix adjustment.

[0223] In one aspect, the present disclosure provides a deoxyribonucleic acid polynucleotide encoding the engineered retrotransposase system described herein.

[0224] In one aspect, the present disclosure provides a nucleic acid comprising an engineered nucleic acid sequence. In some embodiments, the engineered nucleic acid sequence is optimized for expression in an organism. In some embodiments, the retrotransposase is derived from an uncultivated microorganism. In some embodiments, the organism is not the uncultivated organism.

[0225] In some embodiments, the retrotransposase comprises a sequence having at least about 70% sequence identity to any one of SEQ ID NOs: 1-29, 393-735, or 799-895. In some embodiments, the retrotransposase comprises a sequence having at least about 20%, at least about 25%, at least about 30%, at least about 35%, at least about 40%, at least about 45%, at least about 50%, at least about 55%, at least about 60%, at least about 65%, at least about 70%, at least about 75%, at least about 80%, at least about 85%, at least about 90%, at least about 91%, at least about 92%, at least about 93%, at least about 94%, at least about 95%, at least about 96%, at least about 97%, at least about 98%, or at least about 99% sequence identity to any one of SEQ ID NOs: 1-29, 393-735, or 799-895.

[0226] In some embodiments, the retrotransposase comprises a variant having at least about 20%, at least about 25%, at least about 30%, at least about 35%, at least about 40%, at least about 45%, at least about 50%, at least about 55%, at least about 60%, at least about 65%, at least about 70%, at least about 75%, at least about 80%, at least about 85%, at least about 90%, at least about 91%, at least about 92%, at least about 93%, at least about 94%, at least about 95%, at least about 96%, at least about 97%, at least about 98%, or at least about 99% sequence identity to any one of SEQ ID NOs: 1-29, 393-735, or 799-895. In some embodiments, the retrotransposase may be substantially identical to any one of SEQ ID NOs: 1-29, 393-735, or 799-895.

[0227] In some embodiments, the retrotransposase comprises a reverse transcriptase domain. In some embodiments, the retrotransposase further comprises one or more zinc finger domains. In some embodiments, the retrotransposase further comprises an endonuclease finger domain.

[0228] In some embodiments, the retrotransposase has less than about 90%, less than about 85%, less than about 80%, less than about 75%, less than about 70%, less than about 65%, less than about 60%, less than about 55%, less than about 50%, less than about 45%, less than about 40%, less than about 35%, less than about 30%, less than about 25%, less than about 20%, less than about 15%, less than about 10%, or less than about 5% sequence identity to a documented retrotransposase.

[0229] In some embodiments, the cargo nucleotide sequence is flanked by a 3′ untranslated region (UTR) and a 5′ untranslated region (UTR).

[0230] In some embodiments, the retrotransposase is configured to transpose the cargo nucleotide sequence as single-stranded deoxyribonucleic acid polynucleotide. In some embodiments, the retrotransposase is configured to transpose the cargo nucleotide sequence as double-stranded deoxyribonucleic acid polynucleotide. In some embodiments, the retrotransposase is configured to transpose said cargo nucleotide sequence via a ribonucleic acid polynucleotide intermediate.

[0231] In some embodiments, the retrotransposase comprises a sequence complementary to a eukaryotic, fungal, plant, mammalian, or human genomic polynucleotide sequence. In some embodiments, the retrotransposase comprises a sequence complementary to a eukaryotic genomic polynucleotide sequence. In some embodiments, the retrotransposase comprises a sequence complementary to a fungal genomic polynucleotide sequence. In some embodiments, the retrotransposase comprises a sequence complementary to a plant genomic polynucleotide sequence. In some embodiments, the retrotransposase comprises a sequence complementary to a mammalian genomic polynucleotide sequence. In some embodiments, the retrotransposase comprises a sequence complementary to a human genomic polynucleotide sequence.

[0232] In some embodiments, the retrotransposase may comprise a variant having one or more nuclear localization sequences (NLSs). The NLS may be proximal to the N- or C-terminus of the retrotransposase. The NLS may be appended N-terminal or C-terminal to any one of SEQ ID NOs: 896-911, or to a variant having at least about 20%, at least about 25%, at least about 30%, at least about 35%, at least about 40%, at least about 45%, at least about 50%, at least about 55%, at least about 60%, at least about 65%, at least about 70%, at least about 75%, at least about 80%, at least about 85%, at least about 90%, at least about 91%, at least about 92%, at least about 93%, at least about 94%, at least about 95%, at least about 96%, at least about 97%, at least about 98%, or at least about 99% sequence identity to any one of SEQ ID NOs: 896-911. In some embodiments, the NLS may comprise a sequence substantially identical to any one of SEQ ID NOs: 896-911. In some embodiments, the NLS may comprise a sequence substantially identical to SEQ ID NO: 896. In some embodiments, the NLS may comprise a sequence substantially identical to SEQ ID NO: 897.

[0233] In some embodiments, the organism is prokaryotic. In some embodiments, the organism is bacterial. In some embodiments, the organism is eukaryotic. In some embodiments, the organism is fungal. In some embodiments, the organism is a plant. In some embodiments, the organism is mammalian. In some embodiments, the organism is a rodent. In some embodiments, the organism is human.

[0234] In one aspect, the present disclosure provides an engineered vector. In some embodiments, the engineered vector comprises a nucleic acid sequence encoding a retrotransposase. In some embodiments, the retrotransposase is derived from an uncultivated microorganism.

[0235] In some embodiments, the engineered vector comprises a nucleic acid described herein. In some embodiments, the nucleic acid described herein is a deoxyribonucleic acid polynucleotide described herein. In some embodiments, the vector is a plasmid, a minicircle, a CELiD, an adeno-associated virus (AAV) derived virion, or a lentivirus.

[0236] In one aspect, the present disclosure provides a cell comprising a vector described herein.

[0237] In one aspect, the present disclosure provides a method of manufacturing a retrotransposase. In some embodiments, the method comprises cultivating the cell.

[0238] In one aspect, the present disclosure provides a method for binding, nicking, cleaving, marking, modifying, or transposing a double-stranded deoxyribonucleic acid polynucleotide. The method may comprise contacting the double-stranded deoxyribonucleic acid polynucleotide with a retrotransposase. In some embodiments, the cargo nucleotide sequence is flanked by a 3′ untranslated region (UTR) and a 5′ untranslated region (UTR).

[0239] In some embodiments, the retrotransposase comprises a reverse transcriptase domain. In some embodiments, the retrotransposase further comprises one or more zinc finger domains. In some embodiments, the retrotransposase further comprises an endonuclease finger domain.

[0240] In some embodiments, the retrotransposase has less than about 90%, less than about 85%, less than about 80%, less than about 75%, less than about 70%, less than about 65%, less than about 60%, less than about 55%, less than about 50%, less than about 45%, less than about 40%, less than about 35%, less than about 30%, less than about 25%, less than about 20%, less than about 15%, less than about 10%, or less than about 5% sequence identity to a documented retrotransposase.

[0241] In some embodiments, the retrotransposase is configured to transpose the cargo nucleotide sequence as single-stranded deoxyribonucleic acid polynucleotide. In some embodiments, the retrotransposase is configured to transpose the cargo nucleotide sequence as double-stranded deoxyribonucleic acid polynucleotide. In some embodiments, the retrotransposase is configured to transpose said cargo nucleotide sequence via a ribonucleic acid polynucleotide intermediate.

[0242] In some embodiments, the retrotransposase is derived from an uncultivated microorganism. In some embodiments, the double-stranded deoxyribonucleic acid polynucleotide is a eukaryotic, plant, fungal, mammalian, rodent, or human double-stranded deoxyribonucleic acid polynucleotide.

[0243] In one aspect, the present disclosure provides a method of modifying a target nucleic acid locus. The method may comprise delivering to the target nucleic acid locus the engineered retrotransposase system described herein. In some embodiments, the complex is configured such that upon binding of the complex to the target nucleic acid locus, the complex modifies the target nucleic acid locus.

[0244] In some embodiments, modifying the target nucleic acid locus comprises binding, nicking, cleaving, marking, modifying, or transposing the target nucleic acid locus. In some embodiments, the target nucleic acid locus comprises deoxyribonucleic acid (DNA) or ribonucleic acid (RNA). In some embodiments, the target nucleic acid comprises genomic DNA, viral DNA, viral RNA, or bacterial DNA. In some embodiments, the target nucleic acid locus is in vitro. In some embodiments, the target nucleic acid locus is within a cell. In some embodiments, the cell is a prokaryotic cell, a bacterial cell, a eukaryotic cell, a fungal cell, a plant cell, an animal cell, a mammalian cell, a rodent cell, a primate cell, or a human cell. In some embodiments, the cell is a primary cell. In some embodiments, the primary cell is a T cell. In some embodiments, the primary cell is a hematopoietic stem cell (HSC).

[0245] In some embodiments, delivery of the engineered retrotransposase system to the target nucleic acid locus comprises delivering the nucleic acid described herein or the vector described herein. In some embodiments, delivery of engineered retrotransposase system to the target nucleic acid locus comprises delivering a nucleic acid comprising an open reading frame encoding the retrotransposase. In some embodiments, the nucleic acid comprises a promoter. In some embodiments, the open reading frame encoding the retrotransposase is operably linked to the promoter.

[0246] In some embodiments, delivery of the engineered retrotransposase system to the target nucleic acid locus comprises delivering a capped mRNA containing the open reading frame encoding the retrotransposase. In some embodiments, delivery of the engineered retrotransposase system to the target nucleic acid locus comprises delivering a translated polypeptide. In some embodiments, delivery of the engineered retrotransposase system to the target nucleic acid locus comprises delivering a deoxyribonucleic acid (DNA) encoding the engineered guide RNA operably linked to a ribonucleic acid (RNA) pol III promoter.

[0247] In some embodiments, the retrotransposase does not induce a break at or proximal to said target nucleic acid locus.

[0248] In one aspect, the present disclosure provides a host cell comprising an open reading frame encoding a heterologous retrotransposase. In some embodiments, the retrotransposase comprises a sequence having at least about 70% sequence identity to any one of SEQ ID NOs: 1-29, 393-735, or 799-895. In some embodiments, the retrotransposase comprises a sequence having at least about 20%, at least about 25%, at least about 30%, at least about 35%, at least about 40%, at least about 45%, at least about 50%, at least about 55%, at least about 60%, at least about 65%, at least about 70%, at least about 75%, at least about 80%, at least about 85%, at least about 90%, at least about 91%, at least about 92%, at least about 93%, at least about 94%, at least about 95%, at least about 96%, at least about 97%, at least about 98%, or at least about 99% sequence identity to any one of SEQ ID NOs: 1-29, 393-735, or 799-895.

[0249] In some embodiments, the retrotransposase comprises a variant having at least about 20%, at least about 25%, at least about 30%, at least about 35%, at least about 40%, at least about 45%, at least about 50%, at least about 55%, at least about 60%, at least about 65%, at least about 70%, at least about 75%, at least about 80%, at least about 85%, at least about 90%, at least about 91%, at least about 92%, at least about 93%, at least about 94%, at least about 95%, at least about 96%, at least about 97%, at least about 98%, or at least about 99% sequence identity to any one of SEQ ID NOs: 1-29, 393-735, or 799-895. In some embodiments, the retrotransposase may be substantially identical to any one of SEQ ID NOs: 1-29, 393-735, or 799-895.

[0250] In some embodiments, the retrotransposase comprises a reverse transcriptase domain. In some embodiments, the retrotransposase further comprises one or more zinc finger domains. In some embodiments, the retrotransposase further comprises an endonuclease finger domain.

[0251] In some embodiments, the retrotransposase has less than about 90%, less than about 85%, less than about 80%, less than about 75%, less than about 70%, less than about 65%, less than about 60%, less than about 55%, less than about 50%, less than about 45%, less than about 40%, less than about 35%, less than about 30%, less than about 25%, less than about 20%, less than about 15%, less than about 10%, or less than about 5% sequence identity to a documented retrotransposase.

[0252] In some embodiments, the cargo nucleotide sequence is flanked by a 3′ untranslated region (UTR) and a 5′ untranslated region (UTR).

[0253] In some embodiments, the retrotransposase is configured to transpose the cargo nucleotide sequence as double-stranded deoxyribonucleic acid polynucleotide. In some embodiments, the retrotransposase is configured to transpose the cargo nucleotide sequence as double-stranded deoxyribonucleic acid polynucleotide. In some embodiments, the retrotransposase is configured to transpose said cargo nucleotide sequence via a ribonucleic acid polynucleotide intermediate.

[0254] In some embodiments, the host cell is an E. coli cell. In some embodiments, the E. coli cell is a λDE3 lysogen or the E. coli cell is a BL21(DE3) strain. In some embodiments, the E. coli cell has an ompT lon genotype.

[0255] In some embodiments, the open reading frame is operably linked to a T7 promoter sequence, a T7-lac promoter sequence, a lac promoter sequence, a tac promoter sequence, a trc promoter sequence, a ParaBAD promoter sequence, a PrhaBAD promoter sequence, a T5 promoter sequence, a cspA promoter sequence, an araPBAD promoter, a strong leftward promoter from phage lambda (pL promoter), or any combination thereof.

[0256] In some embodiments, the open reading frame comprises a sequence encoding an affinity tag linked in-frame to a sequence encoding the retrotransposase. In some embodiments, the affinity tag is an immobilized metal affinity chromatography (IMAC) tag. In some embodiments, the IMAC tag is a polyhistidine tag. In some embodiments, the affinity tag is a myc tag, a human influenza hemagglutinin (HA) tag, a maltose binding protein (MBP) tag, a glutathione S-transferase (GST) tag, a streptavidin tag, a FLAG tag, or any combination thereof. In some embodiments, the affinity tag is linked in-frame to the sequence encoding the retrotransposase via a linker sequence encoding a protease cleavage site. In some embodiments, the protease cleavage site is a tobacco etch virus (TEV) protease cleavage site, a PreScission® protease cleavage site, a Thrombin cleavage site, a Factor Xa cleavage site, an enterokinase cleavage site, or any combination thereof.

[0257] In some embodiments, the open reading frame is codon-optimized for expression in the host cell. In some embodiments, the open reading frame is provided on a vector. In some embodiments, the open reading frame is integrated into a genome of the host cell.

[0258] In one aspect, the present disclosure provides a culture comprising a host cell described herein in compatible liquid medium.

[0259] In one aspect, the present disclosure provides a method of producing a retrotransposase, comprising cultivating a host cell described herein in compatible growth medium. In some embodiments, the method further comprises inducing expression of the retrotransposase by addition of an additional chemical agent or an increased amount of a nutrient. In some embodiments, the additional chemical agent or increased amount of a nutrient comprises Isopropyl β-D-1-thiogalactopyranoside (IPTG) or additional amounts of lactose. In some embodiments, the method further comprises isolating the host cell after the cultivation and lysing the host cell to produce a protein extract. In some embodiments, the method further comprises subjecting the protein extract to IMAC, or ion-affinity chromatography. In some embodiments, the open reading frame comprises a sequence encoding an IMAC affinity tag linked in-frame to a sequence encoding the retrotransposase. In some embodiments, the IMAC affinity tag is linked in-frame to the sequence encoding the retrotransposase via a linker sequence encoding protease cleavage site. In some embodiments, the protease cleavage site comprises a tobacco etch virus (TEV) protease cleavage site, a PreScission® protease cleavage site, a Thrombin cleavage site, a Factor Xa cleavage site, an enterokinase cleavage site, or any combination thereof. In some embodiments, the method further comprises cleaving the IMAC affinity tag by contacting a protease corresponding to the protease cleavage site to the retrotransposase. In some embodiments, the method further comprises performing subtractive IMAC affinity chromatography to remove the affinity tag from a composition comprising the retrotransposase.

[0260] In one aspect, the present disclosure provides a method of disrupting a locus in a cell. In some embodiments, the method comprises contacting to the cell a composition comprising a retrotransposase. In some embodiments, the retrotransposase has at least equivalent transposition activity to a documented retrotransposase in a cell. In some embodiments, the retrotransposase comprises a sequence having at least about 70% sequence identity to any one of SEQ ID NOs: 1-29, 393-735, or 799-895. In some embodiments, the retrotransposase comprises a sequence having at least about 20%, at least about 25%, at least about 30%, at least about 35%, at least about 40%, at least about 45%, at least about 50%, at least about 55%, at least about 60%, at least about 65%, at least about 70%, at least about 75%, at least about 80%, at least about 85%, at least about 90%, at least about 91%, at least about 92%, at least about 93%, at least about 94%, at least about 95%, at least about 96%, at least about 97%, at least about 98%, or at least about 99% sequence identity to any one of SEQ ID NOs: 1-29, 393-735, or 799-895.

[0261] In some embodiments, the retrotransposase comprises a variant having at least about 20%, at least about 25%, at least about 30%, at least about 35%, at least about 40%, at least about 45%, at least about 50%, at least about 55%, at least about 60%, at least about 65%, at least about 70%, at least about 75%, at least about 80%, at least about 85%, at least about 90%, at least about 91%, at least about 92%, at least about 93%, at least about 94%, at least about 95%, at least about 96%, at least about 97%, at least about 98%, or at least about 99% sequence identity to any one of SEQ ID NOs: 1-29, 393-735, or 799-895. In some embodiments, the retrotransposase may be substantially identical to any one of SEQ ID NOs: 1-29, 393-735, or 799-895.

[0262] In some embodiments, the retrotransposase comprises a reverse transcriptase domain. In some embodiments, the retrotransposase further comprises one or more zinc finger domains. In some embodiments, the retrotransposase further comprises an endonuclease finger domain.

[0263] In some embodiments, the retrotransposase has less than about 90%, less than about 85%, less than about 80%, less than about 75%, less than about 70%, less than about 65%, less than about 60%, less than about 55%, less than about 50%, less than about 45%, less than about 40%, less than about 35%, less than about 30%, less than about 25%, less than about 20%, less than about 15%, less than about 10%, or less than about 5% sequence identity to a documented retrotransposase.

[0264] In some embodiments, the cargo nucleotide sequence is flanked by a 3′ untranslated region (UTR) and a 5′ untranslated region (UTR).

[0265] In some embodiments, the retrotransposase is configured to transpose the cargo nucleotide sequence as double-stranded deoxyribonucleic acid polynucleotide. In some embodiments, the retrotransposase is configured to transpose the cargo nucleotide sequence as single-stranded deoxyribonucleic acid polynucleotide. In some embodiments, the retrotransposase is configured to transpose said cargo nucleotide sequence via a ribonucleic acid polynucleotide intermediate.

[0266] In some embodiments, the retrotransposase comprises a sequence complementary to a eukaryotic, fungal, plant, mammalian, or human genomic polynucleotide sequence. In some embodiments, the retrotransposase comprises a sequence complementary to a eukaryotic genomic polynucleotide sequence. In some embodiments, the retrotransposase comprises a sequence complementary to a fungal genomic polynucleotide sequence. In some embodiments, the retrotransposase comprises a sequence complementary to a plant genomic polynucleotide sequence. In some embodiments, the retrotransposase comprises a sequence complementary to a mammalian genomic polynucleotide sequence. In some embodiments, the retrotransposase comprises a sequence complementary to a human genomic polynucleotide sequence.

[0267] In some embodiments, the retrotransposase may comprise a variant having one or more nuclear localization sequences (NLSs). The NLS may be proximal to the N- or C-terminus of the retrotransposase. The NLS may be appended N-terminal or C-terminal to any one of SEQ ID NOs: 896-911, or to a variant having at least about 20%, at least about 25%, at least about 30%, at least about 35%, at least about 40%, at least about 45%, at least about 50%, at least about 55%, at least about 60%, at least about 65%, at least about 70%, at least about 75%, at least about 80%, at least about 85%, at least about 90%, at least about 91%, at least about 92%, at least about 93%, at least about 94%, at least about 95%, at least about 96%, at least about 97%, at least about 98%, or at least about 99% sequence identity to any one of SEQ ID NOs: 896-911. In some embodiments, the NLS may comprise a sequence substantially identical to any one of SEQ ID NOs: 896-911. In some embodiments, the NLS may comprise a sequence substantially identical to SEQ ID NO: 896. In some embodiments, the NLS may comprise a sequence substantially identical to SEQ ID NO: 897.

[0268] In some embodiments, the transposition activity is measured in vitro by introducing the retrotransposase to cells comprising the target nucleic acid locus and detecting transposition of the target nucleic acid locus in the cells. In some embodiments, the composition comprises 20 pmoles or less of the retrotransposase. In some embodiments, the composition comprises 1 pmol or less of the retrotransposase.

[0269] Systems of the present disclosure may be used for various applications, such as, for example, nucleic acid editing (e.g., gene editing), binding to a nucleic acid molecule (e.g., sequence-specific binding). Such systems may be used, for example, for addressing (e.g., removing or replacing) a genetically inherited mutation that may cause a disease in a subject, inactivating a gene in order to ascertain its function in a cell, as a diagnostic tool to detect disease-causing genetic elements (e.g. via cleavage of reverse-transcribed viral RNA or an amplified DNA sequence encoding a disease-causing mutation), as deactivated enzymes in combination with a probe to target and detect a specific nucleotide sequence (e.g. sequence encoding antibiotic resistance int bacteria), to render viruses inactive or incapable of infecting host cells by targeting viral genomes, to add genes or amend metabolic pathways to engineer organisms to produce valuable small molecules, macromolecules, or secondary metabolites, to establish a gene drive element for evolutionary selection, to detect cell perturbations by foreign small molecules and nucleotides as a biosensor.

### EXAMPLES

[0270] In accordance with IUPAC conventions, the following abbreviations are used throughout the examples:
[0271] A=adenine
[0272] C=cytosine
[0273] G=guanine
[0274] T=thymine
[0275] R=adenine or guanine
[0276] Y=cytosine or thymine
[0277] S=guanine or cytosine
[0278] W=adenine or thymine
[0279] K=guanine or thymine
[0280] M=adenine or cytosine
[0281] B=C, G, or T
[0282] D=A, G, or T
[0283] H=A, C, or T
[0284] V=A, C, or G

### Example 1—a Method of Metagenomic Analysis for New Proteins

[0285] Metagenomic samples were collected from sediment, soil, and animals. Deoxyribonucleic acid (DNA) was extracted with a Zymobiomics DNA mini-prep kit and sequenced on an Illumina HiSeq® 2500. Samples were collected with consent of property owners. Additional raw sequence data from public sources included animal microbiomes, sediment, soil, hot springs, hydrothermal vents, marine, peat bogs, permafrost, and sewage sequences. Metagenomic sequence data was searched using Hidden Markov Models generated based on documented retrotransposase protein sequences to identify new retrotransposases. Novel retrotransposase proteins identified by the search were aligned to documented proteins to identify potential active sites. This metagenomic workflow resulted in the delineation of the MG140 family described herein.

### Example 2—Discovery of MG140 Family of Retrotransposases

[0286] Analysis of the data from the metagenomic analysis of Example 1 revealed a new cluster of undescribed putative retrotransposase systems comprising 1 family (MG140). The corresponding protein sequences for these new enzymes and their example subdomains are presented as SEQ ID NOs: 1-29, 393-401, and 799-894.

### Example 3—Integration of Reverse Transcribed DNA In Vitro Activity (Prophetic)

[0287] Integrase activity can be conducted via expression in an E. coli lysate-based expression system (for example, myTXTL, Arbor Biosciences). The components used for in vitro testing are three plasmids: an expression plasmid with the retrotransposon gene(s) under a T7 promoter, a target plasmid, and a donor plasmid which contains 5′ and 3′ UTR sequences recognized by the retrotransposase around a selection marker gene (e.g. Tet resistance gene). The lysate-based expression products, target DNA, and donor plasmid are incubated to allow for transposition to occur. Transposition is detected via PCR. In addition, the transposition product will be tagmented with T5 and sequenced via NGS to determine the insertion sites on a population of transposition events. Alternatively, the in vitro transposition products can be transformed into E. coli under antibiotic (e.g. Tet) selection, where growth occurs when the selection marker is stably inserted into a plasmid. Either single colonies or a population of E. coli can be sequenced to determine the insertion sites.

[0288] Integration efficiency can be measured via ddPCR or qPCR of the experimental output of target DNA with integrated cargo, normalized to the amount of unmodified target DNA also measured via ddPCR.

[0289] This assay may also be conducted with purified protein components rather than from lysate-based expression. In this case, the proteins are expressed in E. coli protease-deficient B strain under T7 inducible promoter, the cells are lysed using sonication, and the His-tagged protein of interest is purified using HisTrap FF (GE Lifescience) Ni-NTA affinity chromatography on the AKTA Avant FPLC (GE Lifescience). Purity is determined using densitometry in ImageLab software (Bio-Rad) of the protein bands resolved on SDS-PAGE and InstantBlue Ultrafast (Sigma-Aldrich)-57-oomassie stained acrylamide gels (Bio-Rad). The protein is desalted in storage buffer composed of 50 mM Tris-HCl, 300 mM NaCl, 1 mM TCEP, 5% glycerol; pH 7.5 (or other buffers as determined for maximum stability) and stored at −80° C. After purification the transposon gene(s) are added to the target DNA and donor plasmid as described above in a reaction buffer, for example 26 mM HEPES pH 7.5, 4.2 mM TRIS pH 8, 50 μg/mL BSA, 2 mM ATP, 2.1 mM DTT, 0.05 mM EDTA, 0.2 mM MgCl₂, 30-200 mM NaCl, 21 mM KCl, 1.35% glycerol, (measured pH 7.5) supplemented with 15 mM MgOAc₂.

### Example 4—Retrotransposon End Verification Via Gel Shift (Prophetic)

[0290] The retrotransposon ends are tested for retrotransposase binding via an electrophoretic mobility shift assay (EMSA). In this case, a target DNA fragment (100-500 bp) is end-labeled with FAM via PCR with FAM-labeled primers. The 3′ UTR RNA and 5′ UTR RNA are generated in vitro using T7 RNA polymerase and purified. The retrotransposase proteins are synthesized in an in vitro transcription/translation system (e.g. PURExpress). After synthesis, 1 pL of protein is added to 50 nM of the labeled DNA and 100 ng of the 3′ or 5′ UTR RNA in a 10 μL reaction in binding buffer (e.g. 20 mM HEPES pH 7.5, 2.5 mM Tris pH 7.5, 10 mM NaCl, 0.0625 mM EDTA, 5 mM TCEP, 0.005% BSA, 1 μg/mL poly(dI-dC), and 5% glycerol). The binding is incubated at 30° for 40 minutes, then 2 μL of 6× loading buffer (60 mM KCl, 10 mM Tris pH 7.6, 50% glycerol) is added. The binding reaction is separated on a 5% TBE gel and visualized. Shifts of the 3′ or 5′ UTR in the presence of retrotransposase protein and target DNA can be attributed to successful binding and are indicative of retrotransposase activity. This assay can also be performed with retrotransposase truncations or mutations, as well as using E. coli extract or purified protein.

### Example 5—Cleavage of Target DNA Verification (Prophetic)

[0291] To confirm that the retrotransposase is involved in cleavage of target DNA, short (˜140 bp) DNA fragments are labelled at both ends with FAM via PCR with FAM-labeled primers. In vitro transcription/translation retrotransposase products are pre-incubated with 1 pg of Rnase A (negative control), or 3′ UTR, 5′ UTR or non-specific RNA fragments (control), followed by incubating with labeled target DNA at 37° C. The DNA is then analyzed on a denaturing gel. Cleavage of one or both strands of DNA can result in labelled fragments of various sizes, which migrate at different rates on the gel.

### Example 6—Integrase Activity in E. coli (Prophetic)

[0292] Engineered E. coli strains are transformed with a plasmid expressing the retrotransposon genes and a plasmid containing a temperature-sensitive origin of replication with a selectable marker flanked by 5′ and 3′ UTR of the retrotransposon involved in integration. Transformants induced for expression of these genes are then screened for transfer of the marker to a genomic target by selection at restrictive temperature for plasmid replication and the marker integration in the genome is confirmed by PCR.

[0293] Integrations are screened using an unbiased approach. In brief, purified gDNA is tagmented with Tn5, and DNA of interest is then PCR amplified using primers specific to the Tn5 tagmentation and the selectable marker. The amplicons are then prepared for NGS sequencing. Analysis of the resulting sequences is trimmed of the transposon sequences and flanking sequences are mapped to the genome to determine insertion position, and insertion rates are determined.

### Example 7—Integration of Reverse Transcribed DNA into Mammalian Genomes (Prophetic)

[0294] To show targeting and cleavage activity in mammalian cells, the integrase proteins are purified in E. coli or sf9 cells with 2 NLS peptides either in the N, C or both terminus of the protein sequence. In this procedure, a plasmid containing a selectable neomycin resistance marker (NeoR), or a fluorescent marker flanked by the 5′ and 3′ UTR regions involved in transposition and under control of a CMV promoter is synthesized. Cells are be transfected with the plasmid, recovered for 4-6 hours for RNA transcription, and subsequently electroporated with purified integrase proteins. Antibiotic resistance integration into the genome is quantified by G418-resistant colony counts (selection to start 7 days post-transfection), and positive transposition by the fluorescent marker is assayed by fluorescence activated cell cytometry. 7-10 days after the second transfection, genomic DNA is extracted and used for the preparation of an NGS library. Off target frequency is assayed by fragmenting the genome and preparing amplicons of the transposon marker and flanking DNA for NGS library preparation. At least 40 different target sites are chosen for testing each targeting system's activity.

[0295] Integration in mammalian cells can also be assessed via RNA delivery. An RNA encoding the retrotransposase with 2 NLS is designed, and cap and polyA tail are added. A second RNA is designed containing a selectable neomycin resistance marker (NeoR) or a fluorescent marker flanked by the 5′ and 3′ UTR regions. The RNA constructs are introduced into mammalian cells via Lipofectamine™ RNAiMAX or TransIT®-mRNA transfection reagent. 10 days post-transfection, genomic DNA is extracted to measure transposition efficiency using ddPCR and NGS.

### Example 8—Bioinformatic Discovery of RTs

[0296] An extensive assembly-driven metagenomic database of microbial, viral, and eukaryotic genomes was mined to retrieve predicted proteins with reverse transcriptase function. Over 4.5 million RT proteins were predicted on the basis of having a hit to the Pfam domains PF00078 and PF07727, of which 3.4 million had a significant e-value (<1×10⁻⁵). After filtering for complete ORFs with an RT (reverse transcriptase) domain coverage of ≥70%, and with predicted catalytic residues ([F/Y]XDD), nearly half a million proteins were retained for further analysis. The RT domains were extracted from this set of proteins, as well as from reference sequences retrieved from public databases. The domain sequences were clustered at 50% identity over 80% coverage with Mmseqs2 easy-cluster (see Bioinformatics 2016 May 1; 32(9):1323-30, which is incorporated by reference in its entirety herein), representative sequences (26,824 in total) were aligned with MAFFT with parameters—globalpair—large (see Bioinformatics 2016; 32: 3246-3251, which is incorporated by reference in its entirety herein), and the domain alignment was used to infer a phylogenetic tree with FastTree2 (see Plos One 2010; 5: e9490, which is incorporated by reference in its entirety herein). Phylogenetic analysis of RT domains suggest that many different classes of RTs with high sequence diversity were recovered (FIG. 4).

### Example 9—Example Non-LTR Retrotransposons (MG140, MG146, MG147, MG148, and MG149 Families)

### Retrotransposon Bioinformatic Analysis

[0297] Non long terminal repeat (non-LTR) retrotransposases are capable of integrating large cargo into a target site via reverse transcription of an RNA template. Non-LTR retrotransposases were identified within the R2/R4 and LINE clades from the phylogenetic tree in FIG. 4. Full-length proteins containing RT domains classified as R2, R4, and LINEs were clustered at 99% sequence identity, and representative sequences were aligned with MAFFT with parameters—globalpair—large. A phylogenetic tree was inferred from this alignment and R2/R4 retrotransposase families, as well as other RT-related families, were delineated (FIG. 5A).

[0298] R2s are non-LTR retrotransposons that integrate cargo via target-primed reverse transcription (TPRT). Many R2 enzymes of the MG140 family contain an RT domain, as well as endonuclease domain and multiple Zn-binding ribbon motifs that delineate Zn-Fingers (FIGS. 5B and 6A). Some R2 retrotransposons integrate into the 28S rDNA, as shown by the boundaries of the MG140-47 (SEQ ID NO: 395) R2 retrotransposon flanked by fragments of a 28S rDNA gene (FIG. 6B). Other retrotransposons integrate into the 18S rRNA gene and contain a polyA or polyT tail that defines the 3′ end of the transposon (FIG. 7). It is possible that the exact target binding site, as well as 5′-UTR, 3′-UTR, and poly-T are involved in accurate and specific integration.

[0299] The retrotransposon MG146-1 (SEQ ID NO: 402), which was derived from an Archaeal genome, contains an RT domain, Zn-binding ribbon motifs, and an endonuclease domain, and the domain architecture within the enzyme differs from that of other single ORF non-LTR retrotransposons (FIG. 8A).

[0300] MG147 family member MG140-17-R2 (SEQ ID NO: 18) retrotransposon is organized into three ORFs flanked by 5′ and 3′ UTRs (FIG. 8B). The RNA recognition motif (RRM) gene is likely involved in recognition of the RNA template, while the endonuclease gene is likely involved in recognition and nicking of the target site. ORF three is the enzyme responsible for reverse transcription of the template and contains an RT domain, Zn-binding ribbon motifs, and an RNAse-H domain.

[0301] Family MG148 includes extremely divergent RT homologs, predicted to be active by the presence of all expected catalytic residues. Alignment at the nucleotide level for several family members uncovered conserved regions within the 5′ UTR, which are possibly involved in RT function, activity or mobilization (FIG. 9B).

Testing the In Vitro Activity of Retrotransposon RTs (Reverse Transcriptases) by qPCR

[0302] The in vitro activity of retrotransposon RTs was assessed by a primer extension reaction containing RT enzyme derived from a cell-free expression system (PURExpress, NEB) and 100 nM of RNA template (200 nt) annealed to a DNA primer in reaction buffer containing 40 mM Tris-HCl (pH 7.5), 0.2 M NaCl, 10 mM MgCl₂, 1 mM TCEP, and 0.5 mM dNTPs. The resulting full-length cDNA product was quantified by qPCR by extrapolating values from a standard curve generated with the DNA template of specific concentrations.

[0303] MG140-3 (SEQ ID NO: 3), MG140-6 (SEQ ID NO: 6), MG140-7 (SEQ ID NO: 7), MG140-8 (SEQ ID NO: 8), MG140-13 (SEQ ID NO: 14), and MG146-1 (SEQ ID NO: 402) are active via primer extension (FIGS. 10 and 11). Preliminary assessment of fidelity was performed for MG140-3 and MG146-1, resulting in a relative error rate 1.5 and 1.35-times higher than MMLV, respectively (FIG. 12). For fidelity measurements, the resulting full-length cDNA product generated in the primer extension assay described above was PCR-amplified, library-prepped, and subjected to next generation sequencing. Trimmed reads were aligned to the reference sequence and the frequency of misincorporation was calculated.

### Integration Site

[0304] Some non-LTR retrotransposons (e.g. MG140 family such as MG140-1) are predicted to integrate into the 28S rDNA gene by targeting specific GGTGAC motifs, with the insertion site between the second (G) and third (T) positions. The N-terminus of such retrotransposon proteins contains three zinc (Zn) fingers (two of the CCHH type and one of type CCHC), which are followed by the reverse transcriptase (RT) domain with a YADD active site. The C-terminus of such retrotransposon proteins includes an endonuclease domain with an additional CCHC Zn-finger. The protein is flanked by 5′ and 3′ UTRs that are 289 and 478 bp long, respectively (FIG. 31).

### Example 10—Group II Intron RTs (MG153, MG163, MG164, MG165, MG166, MG167, MG168, MG169, and MG170 Families)

### Group II Bioinformatic Analysis

[0305] Group II introns are capable of integrating large cargo into a target site via reverse transcription of an RNA template. RT domains from Group II introns were identified and delineated in the phylogenetic tree in FIG. 4. Over 10,000 unique full-length Group II intron proteins containing RT domains from contigs with >2 kb of sequence flanking the RT enzyme were aligned with MAFFT with parameters—globalpair—large. A phylogenetic tree was inferred from this alignment and Group II intron families were further identified (FIG. 13). Group II intron enzymes can be classified into classes A-G, ML, and CL, and their domain architecture includes an RT domain predicted to be active, as well as a maturase domain involved in intron mobilization. Some Group II intron proteins contain an additional endonuclease domain likely involved in target recognition and cleavage. Many candidates from all families identified were nominated for laboratory characterization.

### Testing the In Vitro Activity of Group H Intron RTs Class C, D, and F

[0306] The in vitro activity of GII intron Class C (MG153), Class D (MG165), and Class F (MG167) RTs was assessed by a primer extension reaction containing RT enzyme derived from a cell-free expression system (PURExpress, NEB). Expression constructs were codon-optimized for E. coli and contained an N-terminal single Strep tag. Expression of the RT was confirmed by SDS-PAGE analysis. The substrate for the reaction was 100 nM of RNA template (200 nt) annealed to a 5′-FAM labeled primer. The reaction buffer contained the following components: 50 mM Tris-HCl (pH 8.0), 75 mM KCl, 3 mM MgCl₂, 10 mM DTT, and 0.5 mM dNTPs. Following incubation at 37° C. for 1 h, the reaction was quenched via incubation with RnaseH (NEB), followed by the addition of 2×RNA loading dye (NEB). The resulting cDNA product(s) were separated on a 10% denaturing polyacrylamide gel and were visualized using a ChemiDoc on the Gel Green setting. RT activity was also assessed by qPCR with primers that amplify the full-length cDNA product. Products from the primer extension assay were diluted to ensure cDNA concentrations were within the linear range of detection. The amount of cDNA was quantified by extrapolating values from a standard curve generated with the DNA template of specific concentrations.

[0307] By detection of cDNA products on a denaturing gel, the following GII intron class C candidates were active under these experimental conditions: MG153-1 through MG153-6 (SEQ ID NOs: 555-560), MG153-9 (SEQ ID NO: 563), MG153-10 (SEQ ID NO: 564), MG153-12 (SEQ ID NO: 566), MG153-13 (SEQ ID NO: 567), MG153-15 (SEQ ID NO: 569), MG153-18 (SEQ ID NO: 572), MG153-20 (SEQ ID NO: 574), MG153-29 through MG153-31 (SEQ ID NOs: 580-582), MG153-33 through MG153-37 (SEQ ID NOs: 584-588), MG153-41 (SEQ ID NO: 592), MG153-42 (SEQ ID NO: 593), MG153-45 (SEQ ID NO: 596), MG153-51 (SEQ ID NO: 602), MG153-53 (SEQ ID NO: 604), MG153-54 (SEQ ID NO: 605), and MG153-57 (SEQ ID NO: 608). (FIGS. 14 and 15). Active novel candidates exhibit a varying degree of apparent processivity compared to the highly processive control GII Class C RTs GsI-IIC and MarathonRT, indicated by the presence of smaller cDNA drop-off products. By qPCR, the following additional candidates are also active under these experimental conditions (cDNA detected>10-fold above background): MG153-7 (SEQ ID NO: 561), MG153-8 (SEQ ID NO: 562), MG153-10 (SEQ ID NO: 564), MG153-11 (SEQ ID NO: 565), MG153-14 (SEQ ID NO: 568), MG153-17 (SEQ ID NO: 571), MG153-19 (SEQ ID NO: 573), MG153-25 through MG153-28 (SEQ ID NOs: 576-579), MG153-32 (SEQ ID NO: 583), MG153-39 (SEQ ID NO: 590), MG153-40 (SEQ ID NO: 591), MG153-43 (SEQ ID NO: 594), MG153-47 (SEQ ID NO: 598), MG153-50 (SEQ ID NO: 601), MG153-55 (SEQ ID NO: 606) and MG153-56 (SEQ ID NO: 607) (FIGS. 14D and 15D).

[0308] By detection of cDNA products on a denaturing gel, GII intron class D candidates MG165-1 (SEQ ID NO: 684) and MG165-5 (SEQ ID NO: 688) are active under these experimental conditions (FIG. 16A). By qPCR, additional candidates MG165-4 (SEQ ID NO: 687), MG165-6 (SEQ ID NO: 689), and MG165-8 (SEQ ID NO: 691) are also active under these experimental conditions (cDNA detected>10-fold above background) (FIG. 16B).

[0309] By detection of cDNA products on a denaturing gel, GII intron Class F candidates MG167-1 (SEQ ID NO: 698) and MG167-4 (SEQ ID NO: 701) are active under these experimental conditions (FIG. 17A). By qPCR, additional candidates MG167-3 (SEQ ID NO: 700) and MG167-5 (SEQ ID NO: 702) are also active under these experimental conditions (cDNA detected>10-fold above background) (FIG. 17B).

### Assessment of Relative Fidelity of GII Intron RTs

[0310] To assess the relative fidelity of GII Class C MG153 candidates, the resulting full-length cDNA product generated in the primer extension assay described above was PCR-amplified, library-prepped, and subjected to next generation sequencing. Paired reads were merged using bbmerge.sh requiring a perfect overlap and trimming all non-overlapping portions (Plos One 2017; 12: e0185056). Merged reads were then aligned to the reference template using BWA-MEM (Li H. 2013), and pysamstats (https://github.com/alimanfoo/pysamstats) was used to calculate the number of mismatches at each position relative to the reference. Of the GII Class C candidates tested, MG153-6 (SEQ ID NO: 560) and MG153-12 (SEQ ID NO: 566) have reproducibly higher error rates compared to MMLV control RT and other GII intron Class C RTs (FIG. 18).

Human Cells cDNA Synthesis Results

[0311] The ability of these enzymes to produce cDNA in a mammalian environment was tested by expressing them in mammalian cells and detecting cDNA synthesis by PCR, followed by agarose electrophoresis and D1000 TapeStation. Reverse transcriptases were cloned in a plasmid for mammalian expression under the CMV promoter as fusion proteins having MS2 coat protein (MCP) at the N terminus, in addition to a flag-HA tag (FH). MCP is a protein derived from the MS2 bacteriophage that recognizes a 20 nucleotide RNA stem loop with high affinity (subnanomolar Kd). By fusing the RTs with MCP and having the MS2 loops in the RNA template, it is ensured that once the RT is translated, it finds the RNA template and starts cDNA synthesis from the DNA primer hybridized to the RNA template.

[0312] A plasmid containing MCP fused to the RT candidate under CMV promoter was cloned and isolated for transfection in HEK293T cells. Transfection was performed using lipofectamine 2000. mRNA codifying nanoluciferase (SEQ ID NO: 33) was made using mMESSAGE mMACHINE (Thermo Fisher) according to the manufacturer instructions. In order to degrade any DNA template left in the mRNA preparation, the reaction was treated with Turbo Dnase (Thermo Fisher) for 1 hour, and the mRNA was cleaned using MEGAclear Transcription Clean-Up kit (Thermo Fisher). The mRNA was hybridized to a complementary DNA primer (SEQ ID NO: 34) in 10 mM Tris pH 7.5, 50 mM NaCl at 95° C. for 2 min and cooled to 4° C. at the rate of 0.1° C./s. The mRNA/DNA hybrid was transfected into HEK293T cells using Lipofectamine Messenger Max 6 hours after the plasmid containing the MCP-RT fusion was transfected. 18 hours post mRNA/DNA transfection, cells were lysed using QuickExtra DNA Extraction Solution (Lucigen), 100 μL of quick extract was added per 24 well in a 24 well plate. The nanoluciferase is ˜500 bp long, primers to amplify products of 100 bp and 542 bp from the newly synthesized cDNA were designed (SEQ ID NOs: 38 and 39). cDNA was amplified using the set of primers mentioned above, and PCR products were detected by agarose gel electrophoresis (FIG. 19A) or DNA Tape Station (FIG. 19B).

[0313] Activity for the control GII intron RTs Marathon, Marathon PE2, and TGIRT was detected (FIGS. 19A and 19B), as shown by the presence of a 100 bp and 500 bp DNA product. Moreover, activity for novel GII intron derived RTs MG153-1 through MG153-4 (SEQ ID NOs: 555-558), MG153-7 through MG153-13 (SEQ ID NOs: 561-567), MG153-15 (SEQ ID NO: 569), MG153-16 (SEQ ID NO: 570) and MG153-21 (SEQ ID NO: 575) was also shown (FIGS. 19A, 19B, and 19C). The signal of the PCR product for the novel RTs was similar to that of Marathon and TGIRT. Altogether, this shows that these newly discovered RTs are expressed, fold properly, and are active inside living mammalian cells, opening options for their biotechnological applications.

Group II Intron RTs are Capable of Synthesizing cDNA Using Modified Primers

[0314] The in vitro activity of RTs was assessed by a primer extension reaction containing RT enzyme derived from a cell-free expression system (PURExpress, NEB). Expression constructs were codon-optimized for E. coli and contained an N-terminal single Strep tag. The substrate for the reaction was 100 nM of RNA template (202 nt) annealed to a 5′-FAM labeled DNA primer containing phosphorothioate (PS) bond modifications at various locations within the primer. Primer 1 (SEQ ID NO: 736, comprising a sequence/56-FAM/A*G*A*C*G*GTCACAGCTTGTCTG) contains 5 PS bonds at the 5′ end of the oligo. Primer 2 (SEQ ID NO: 737, comprising a sequence/56-FAM/A*G*A*C*G*GTCACAGCTT*G*T*C*T*G wherein * denotes a phosphorothioate bond) contains 5 PS bonds at both 5′ and 3 ends of the oligo. Primer 3 (SEQ ID NO: 738, comprising a sequence of/56-FAM/A*G*A*C*G*GTCACAGCTT*G*T*C*TG, wherein * denotes a phosphorothioate bond) differs from Primer 2 in that a standard bond is replaced between the two most 3′ terminal nucleotides. The reaction buffer contained the following components: 50 mM Tris-HCl (pH 8.0), 75 mM KCl, 3 mM MgCl₂, 10 mM DTT, and 0.5 mM dNTPs. Following incubation at 37° C. for 1 h, the reaction was quenched via incubation with RnaseH (NEB), followed by the addition of 2×RNA loading dye (NEB). The resulting cDNA product(s) were separated on a 10% denaturing polyacrylamide gel and were visualized using a ChemiDoc on the Gel Green setting. Based on these results, the control RTs MMLV (viral) and TGIRT-III (GII intron) are both capable of performing primer extension with all modified primers (FIG. 32). The GII intron RT MG153-9 is also capable of extending from all tested PS-modified DNA primers (FIG. 33).

Human Cells RT Expression and cDNA Synthesis Results

[0315] The ability of novel GII RTs to synthesize cDNA in a mammalian cell environment was tested as previously described with insubstantial modifications. cDNA synthesis was detected using PCR and analyzed by agarose gel electrophoresis or TapeStation. In order to have a quantitative readout, a Tagman qPCR assay was developed using Tagman qPCR primers already documented with a Tagman probe listed as SEQ ID NO: 739. All tested candidates of the MG153 family were active to various degrees, with activity as broad as four orders of magnitude (FIG. 34). RTs of families tested include MG153-1 through MG153-13, MG153-15, MG153-16, MG153-18, MG153-20, MG153-21, MG153-29 through MG153-31, MG153-33 through MG153-37, MG153-45, MG153-51, MG153-53, MG153-54, MG153-57, MG165-1, MG165-5, MG167-1 and MG167-4. Several RTs (MG153-15, MG153-53, MG153-4, MG153-18, MG153-20, MG153-7 and MG153-5) outperformed the TGIRT control (FIG. 34).

[0316] In order to understand protein expression and stability of the GII RTs in mammalian cells, immunoblots were performed. Briefly, transfected cells were lysed with RIPA lysis buffer (Thermo Fisher) supplemented with protease inhibitors (80 μL per well in a 24 well format). The lysate was centrifuged at 14,000 g for 10 min at 4° C. in order to remove insoluble aggregates. Proteins were quantified using BCA. 3 or 10 pg of total protein was loaded per lane in a 4-12% polyacrylamide SDS gel (Thermo Fisher). All lanes were normalized to the same amount of protein. Proteins were transferred to a PVDF membrane using the iBlot gel transfer system (Invitrogen). Proteins were detected by using a rabbit HA antibody (Cell Signaling), using an HRP-based detection method. Results suggest varying levels of protein expression or stability, as given by the intensity of the band (FIGS. 35A-35C). We quantified the expression of each protein and normalized cDNA synthesis activity to total protein expression: seven MG153 RTs outperformed the TGIRT control (FIG. 36). Remarkably MG153-15 shows 10-fold higher cDNA synthesis activity than TGIRT under these conditions.

[0317] Some GII derived RTs form very stable dimers, including one of the positive controls, MarathonRT, as well as MG153-1 through MG153-4 and MG153-9 (FIGS. 35A-35C). The “CAQQ” motif was documented as responsible for stable dimerization in Marathon RT (Nat Struct Mol Biol. 2016 June; 23(6): 558-565). RTs that showed stable dimer formation on immunoblots (MG153-1 through MG153-4) also contain the CAQQ dimerization amino acid motif (FIG. 35C). Dimerization may be an unfavorable feature due to added complexity, therefore RTs that do not form dimers may be optimal for specific biotechnological applications.

TABLE 2
Expected molecular sizes for tested RT candidates

| RT | Expected Protein Size (kDa)* |
|---|---|
| Marathon | 67.8 |
| TGIRT | 67 |
| MG153-1 | 74 |
| MG153-2 | 74 |
| MG153-3 | 74 |
| MG153-4 | 67.6 |
| MG153-7 | 71.7 |
| MG153-8 | 67.6 |
| MG153-9 | 72 |
| MG153-10 | 72.2 |
| MG153-11 | 70.9 |
| MG153-12 | 72.5 |
| MG153-13 | 67.9 |
| MG153-15 | 68.6 |
| MG153-16 | 71.7 |
| MG153-21 | 70.6 |

*Size includes a Flag-HA-MCP tag

### Example 11—G2L4 (MG172 Family)

[0318] G2L4 are RT-containing sequences distantly related to Group II introns (Group II intron-like RTs), which were identified in FIG. 4. Over 600 novel full-length G2L4 enzymes were aligned with MAFFT with parameters—globalpair—large and a phylogenetic tree was inferred from this alignment (FIG. 20). MG172 family members contain RT and maturase domains, and were predicted to have a conserved Y[I/L]DD active site motif. The motif YIDD was recently reported to display increased efficiency with shorter DNA primers in one G2L4 reference (BioRxiv 10.1101/2022.03.14.484287). MG172 enzymes have an average length of 425 aa and share 32% AAI, which highlights the novelty of these systems.

### Example 12—LTR Retrotransposons (MG151 Family)

### LTR Retrotransposon Bioinformatic Analysis

[0319] Long terminal repeat (LTR) retrotransposons integrate into their target sites via reverse transcription of an RNA template. The MG151 family of LTR retrotransposons, which include retroviral and non-viral transposons, was identified in the phylogenetic tree in FIG. 4. Full-length proteins containing LTR RT domains were aligned with MAFFT with parameters—globalpair—large. A phylogenetic tree was inferred from this alignment (FIG. 21A). More than 100 non-viral and retroviral RT enzymes of the MG151 family contain RT and RnaseH domains, and are predicted to be active based on the presence of catalytic residues. The LTR RT polyprotein also encodes protease and integrase domains in a similar architecture seen for HIV and MMLV LTR RTs (FIGS. 21A, 21B, 21C, and 22). The RT and other genes, such as gag or envelope, are flanked by long imperfect long terminal repeats (FIG. 21B). MG151 family members are diverse and novel, sharing 30% amino acid identity (FIG. 22).

[0320] The polyprotein of LTR retrotransposons is naturally processed into protease, RT and Rnase H, and integrase functional units. Therefore, the MG151 RT-RNAse H functional unit boundaries were determined by a combination of sequence and structural alignments. The 3D structure for MG151 polyproteins was predicted using Alphafold2 (Nature 2021; 596: 583-589; and Nucleic Acids Res 2022; 50: D439-D444) and visualized with PyMOL (https://github.com/schrodinger/pymol-open-source). For example, for MG151-82 (SEQ ID NO: 457), the predicted 3D structure identified discrete protease, RT, RNAseH, and integrase domains separated by unstructured linker regions (FIG. 21C). Therefore, the RT-RNAse H functional unit was determined as the two relevant structural domains flanked by unstructured loops. Trimmed variants containing RT and RNAse H domains were nominated for synthesis and laboratory characterization.

### Testing the In Vitro Activity of LTR Retrotransposon RTs

[0321] The in vitro activity of LTR retrotransposon RTs (MG151) was assessed by a primer extension reaction containing RT enzyme derived from a cell-free expression system and RNA template annealed to a 5′-FAM labeled primer as described above, in reaction buffer containing 50 mM Tris-HCl pH 8, 75 mM KCl, 3 mM MgCl₂, 1 mM TCEP, and 0.5 mM dNTPs. The resulting cDNA product(s) were separated on a denaturing polyacrylamide gel and visualized using a ChemiDoc on the Gel Green setting. Based on these results, MG151-80 through MG151-84 (FIG. 23A), as well as MG151-87 through MG151-90 (SEQ ID NOs: 524-527), and MG151-92 through MG151-95 (SEQ ID NOs: 529-532) (FIG. 23B) can synthesize cDNA in vitro.

[0322] To determine assay conditions under which in vitro activity is observed for Ty3, a control LTR retrotransposon RT, the following four reaction buffers were tested: Buffer A (40 mM Tris-HCl pH 7.5, 0.2 M NaCl, 10 mM MgCl₂, 1 mM TCEP); Buffer B (20 mM Tris pH 7.5, 150 mM KCl, 5 mM MgCl₂, 1 mM TCEP, 2% PEG-8000); Buffer C (10 mm Tris-HCl pH 7.5, 80 mm NaCl, 9 mm MgCl₂, 1 mM TCEP, 0.01% (v/v) Triton X-100); and Buffer D (10 mM Tris pH 7.5, 130 mM NaCl, 9 mM MgCl₂, 1 mM TCEP, 10% glycerol). In vitro activity was observed for Buffers A and B (FIG. 23C).

### Testing Priming Parameters and Processivity on a Structure RNA Template

[0323] To determine the reverse transcriptase activity of these LTR RTs on a structured RNA template, different primers of length 6, 8, 10, 13, 16, and 20 nt were annealed onto a structured RNA scaffold. These annealed RNA/DNA hybrids were used in a cDNA generation assay equivalent to those used for overall activity. As shown in FIG. 24A and FIG. 24B, MMLV is active on a structured RNA with a primer binding site from 10-20 nt and extends the template completely to the 5′ end, opening up all structure in the template. MG151-89 (SEQ ID NO: 526) is active with primer lengths of 13-20 and can extend approximately 18 nt, the length of pegRNA until the sgRNA scaffold hairpin is reached. MG151-92 (SEQ ID NO: 529) and MG151-97 (SEQ ID NO: 534) were not active on this template at our level of detection.

### Example 13—Retron RTs (MG154, MG155, MG156, MG157, MG158, MG159, and MG160 Families)

### Retron Bioinformatic Analysis

[0324] Bacterial retrons are DNA elements of approximately 2000 bp in length that encode an RT-coding gene (ret) and a contiguous non-coding RNA containing inverted sequences, the msr and msd. Retrons employ a unique mechanism for RT-DNA synthesis, in which the ncRNA template folds into a conserved secondary structure, insulated between two inverted repeats (a1/a2). The retron RT recognizes the folded ncRNA, and reverse transcription is initiated from a conserved guanosine 2′OH adjacent to the inverted repeats, forming a 2′-5′ linkage between the template RNA and the nascent cDNA strand. In some retrons this 2′-5′ linkage persists into the mature form of processed RT-DNA, while in others an exonuclease cleaves the DNA product resulting in a free 5′ end. Moreover, the RT targets the msr-msd derived from the same retron as its RNA template, providing specificity that may avoid off-target reverse transcription.

[0325] Over 4031 RT domain sequences were identified as retron RTs in the phylogenetic tree in FIG. 4. A subset of 2407 full-length retron protein sequences were selected for further analysis based on the presence of catalytic residues (xxDD) and conserved motifs documented in retron RTs (NaxxH and VTG) (FIGS. 25 and 26). Retrons of families MG154-MG159 and MG173 include members that range between 300 and 650 aa in length, and their 5′ UTR contains predicted ncRNA (msr-msd) trimmed flanked by inverted repeats (FIG. 27).

[0326] In addition, a divergent group of “retron-like” single-domain RT sequences were identified within the retron clade in FIG. 4. The single-domain RTs of the MG160 family range between 250 and 300 aa and are predicted to be active based on the presence of expected RT catalytic residues [F/Y]XDD. Although there is a lack of retron RT crystal and cryo-EM structures in public databases, 3D structure prediction of MG160-3 (SEQ ID NO: 629) indicates a conserved RT domain that aligns with a Group II intron RT domain (FIGS. 28A and 28B). The 5′ UTR of the MG160 family are conserved among family members and fold into conserved secondary structures (FIG. 28C) that are likely important for element activity or mobilization.

### In Vitro Activity of MG154, MG155, MG156, MG157, MG158, and MG159 Family of Retron-Like RTs

[0327] The in vitro activity of retron RTs on a general RNA template was assessed by a primer extension reaction containing RT enzyme derived from a cell-free expression system (PURExpress, NEB). Expression constructs were codon-optimized for E. coli and contained an N-terminal single Strep tag. The substrate for the reaction was 100 nM of RNA template (202 nt) annealed to a 5′-FAM labeled primer. The reaction buffer contained the following components: 50 mM Tris-HCl (pH 8.0), 75 mM KCl, 3 mM MgCl₂, 10 mM DTT, and 0.5 mM dNTPs. Following incubation at 37° C. for 1 h, the reaction was quenched via incubation with RnaseH (NEB), followed by the addition of 2×RNA loading dye (NEB). The resulting cDNA product(s) were separated on a 10% denaturing polyacrylamide gel and were visualized using a ChemiDoc on the Gel Green setting. Based on these results, the following retron RTs are capable of performing primer extension on a general RNA template that is not their own ncRNA: MG155-2 (SEQ ID NO: 612), MG155-3 (SEQ ID NO: 613), MG156-2 (SEQ ID NO: 617), MG157-5 (SEQ ID NO: 622), and MG159-1 (SEQ ID NO: 624).

In Vitro Activity of MG160 family of Retron-Like RTs

[0328] The in vitro activity of retron-like RTs (MG160 family) was assessed by a primer extension reaction containing RT enzyme derived from a cell-free expression system (PURExpress, NEB). Expression constructs were codon-optimized for E. coli and contained an N-terminal single Strep tag. The substrate for the reaction was 100 nM of RNA template (200 nt) annealed to a 5′-FAM labeled primer. The reaction buffer contained the following components: 50 mM Tris-HCl (pH 8.0), 75 mM KCl, 3 mM MgCl₂, 10 mM DTT, and 0.5 mM dNTPs. Following incubation at 37° C. for 1 h, the reaction was quenched via incubation with RnaseH (NEB), followed by the addition of 2×RNA loading dye (NEB). The resulting cDNA product(s) were separated on a 10% denaturing polyacrylamide gel and were visualized using a ChemiDoc on the Gel Green setting. RT activity was also assessed by qPCR with primers that amplify the full-length cDNA product. Products from the primer extension assay were diluted to ensure cDNA concentrations were within the linear range of detection. The amount of cDNA was quantified by extrapolating values from a standard curve generated with the DNA template of documented concentrations.

[0329] By gel analysis, MG160-1 through MG160-4 (SEQ ID NOs: 627-630) and MG160-6 (SEQ ID NO: 633) are active and had diminished processivity compared to GsI-IIC, a control GII intron Class C RT (FIG. 29A and FIG. 29B). Processivity appears more similar to that of MMLV, a retroviral control RT that produces a similar drop-off pattern of cDNA products (FIG. 29A). By qPCR, MG160-1 through MG160-4 (SEQ ID NOs: 627-630) can produce full-length cDNA, while MG160-6 (SEQ ID NO: 633) produced a less than full-length product (FIG. 29B).

Cell-Free Expression of Retron RTs (MG154, MG155, MG156, MG157, MG158, MG159, and MG173 families) and In Vitro Transcription of Retron ncRNAs

[0330] Retron RTs were produced in a cell-free expression system (PURExpress) by incubating 10 ng/μL of a DNA template encoding the E. coli-optimized gene with an N-terminal single Strep tag with the PURExpress components for 2 h at 37° C. All tested retron RTs (MG156-1 (SEQ ID NO: 616), MG156-2 (SEQ ID NO: 617), MG157-1 (SEQ ID NO: 618), MG157-2 (SEQ ID NO: 619), MG157-5 (SEQ ID NO: 622), MG159-1 (SEQ ID NO: 624)) were produced as indicated by SDS-PAGE analysis (FIGS. 30A and 30B).

[0331] The retron ncRNAs were generated using the HiScribe T7 in vitro transcription kit (NEB) and a DNA template encoding the respective ncRNA gene following a T7 promoter. The reaction is then incubated with Dnase-I to eliminate the DNA template and then purified by an RNA cleanup kit (Monarch). Quantity of the ncRNA was determined by nanodrop, and the purity was assessed by Tape Station RNA analysis (FIG. 30C).

### Example 14—Testing Retron RT In Vitro Activity (Prophetic)

[0332] The retron RT enzyme is produced in a cell-free expression system using a construct containing an E. coli codon-optimized gene with an N-terminal single Strep tag as described above. Expression of the enzyme is confirmed by SDS-PAGE analysis. Retron RT activity on a general template is determined by primer extension assay as described above, containing a 200 nt RNA annealed to a 5′-FAM labeled DNA primer. The resulting cDNA product(s) are detected on a denaturing polyacrylamide gel or by qPCR with primers specific for the full-length cDNA product.

[0333] Retron RT in vitro activity on its own ncRNA is assessed in a reaction containing buffer, dNTPs, the retron RT produced from a cell-free expression system, and the refolded ncRNA. RT activity before and after purification of the RT from the cell-free expression system via the N-terminal single Strep tag is compared. After incubation, half of the reaction is treated with Rnase A/T1. Products before and after Rnase A/T1 treatment are evaluated on a denaturing polyacrylamide gel and visualized by SYBR gold staining. In this procedure, Rnase A/T1 is understood to digest away the RNA template and result in a mass shift towards a smaller product containing the ssDNA. Since Rnase H is expected to improve homogeneity of the 5′ and 3′ ssDNA boundaries, the impact of Rnase H on the distribution of products is also evaluated by gel analysis. The covalent linkage between the ncRNA template and ssDNA is confirmed by incubating the RT product with a 5′ to 3′ ssDNA exonuclease (RecJ) before or after treatment with a debranching enzyme (DBR1). RecJ is expected to be able to degrade the ssDNA after DBR1 has removed the 2′-5′ phosphodiester linkage between the RNA and ssDNA.

### Example 15—Determining Retron Msr-Msd Boundaries by NGS (Prophetic)

[0334] The msr-msd boundaries are determined by unbiased ligation of adapter sequences to the 5′ and 3′ end of the msDNA product after removal of the 2′-5′ phosphodiester linkage by DBR1. The resulting ligated product is PCR-amplified, library prepped, and subjected to next generation sequencing. Sequencing reads are aligned to the reference sequence to determine the 5′ and 3′ boundaries of the msd. The impact of the presence of Rnase H in the RT reaction on the homogeneity of 5′ and 3′ msd boundaries is also evaluated.

### Example 16—Systematic Evaluation of Insertion Sequences into the Msd on RT Activity (Prophetic)

[0335] Sequences of distinct length, predicted secondary structure, and GC-content are inserted into the msd at select insertion sites informed by the msd boundaries determined by NGS and secondary structure predictions of the ncRNA. The impact of these insertion sequences on RT activity are assessed by gel analysis or NGS as described above.

### Example 17—Testing the In Vitro Activity of Novel RTs (Prophetic)

[0336] RT activity is assessed using a primer extension assay containing the RT derived from a cell-free expression system and an RNA template annealed to a DNA primer as described above. The resulting cDNA product(s) are detected by a denaturing polyacrylamide gel and qPCR as described above. Detection of cDNA drop-off products on the denaturing gel provides a relative assessment of processivity for novel candidates.

### Example 18—Evaluating the Priming Parameters of Novel RTs (Prophetic)

[0337] Optimal primer length is determined by testing the RT's activity on an RNA template annealed to 5′-FAM labeled DNA primers of either 6, 8, 10, 13, 16, or 20 nucleotides in length. The RT is derived from a cell-free expression system as described above. After incubating the reaction, the reaction is quenched via the addition of Rnase H. The size distribution of cDNA products is analyzed on a denaturing polyacrylamide gel as described above. Optimal primer length is determined as the length that enables the RT to convert the most primer into cDNA product. The experimentally determined optimal primer length is then used in subsequent experiments, such as fidelity and processivity assays, to further characterize the RT in vitro.

### Example 19—Evaluating RT Fidelity (Prophetic)

[0338] To account for errors introduced during PCR and sequencing, RT fidelity is assessed by a primer extension assay as described above with the exception that a 14-nt unique molecular identifier (UMI) barcode is included in the primer for the reverse transcription reaction. The resulting full-length cDNA product is PCR-amplified, library-prepped, and subjected to next-generation sequencing. Barcodes with >5 reads are analyzed. After aligning to the reference sequence, mutations, insertions, and deletions are counted if the error is present in all sequence reads with the same barcode. Errors present in one but not all sequencing reads are considered to be introduced during PCR or sequencing. Further analysis of substitution, insertion, and deletion profile is performed, in addition to identification of mutation hotspots within the RNA template. The fidelity measurements are also performed with modified bases, e.g. pseudouridine, in the template.

### Example 20—Determining the Processivity Coefficient of RTs (Prophetic)

[0339] RT processivity is evaluated using a primer extension assay containing the RT enzyme derived from a cell-free expression system as described above and RNA templates between 1.6 kb-6.6 kb in length annealed to either a 5′-FAM labeled primer (for gel analysis) or unlabeled primer (for sequencing analysis).

[0340] Reverse transcription reactions are performed under single cycle conditions to disfavor rebinding of RT enzymes that have dropped off the RNA template during cDNA synthesis. The optimal trap molecule and concentration to achieve single cycle conditions are experimentally determined. The selected conditions are designed to provide sufficient inhibition of cDNA synthesis if incubated before reaction initiation but otherwise are designed to not impact the velocity of the reaction. Optimal trap molecules to test include unrelated RNA templates and unrelated RNA templates annealed to DNA primers of various lengths.

[0341] Once single cycle reaction conditions have been optimized, processivity is evaluated by initiating the reaction with the addition of dNTPs and the selected trap molecule after pre-equilibrating the RT with the RNA template annealed to a DNA primer in the reaction buffer. After incubating the reaction, the reaction is quenched by the addition of RnaseH. The size distribution of cDNA products is analyzed on a denaturing polyacrylamide gel as described above or subjected to PCR and library prepped for long-read sequencing. From these experiments, a processivity coefficient is quantified as the template length which yields 50% of the full-length cDNA product. The median length of the cDNA product from the single cycle primer extension reaction is used to estimate the probability that the RT will dissociate on the tested template. From this, the probability that the RT will dissociate at each nucleotide position is calculated, assuming that each dissociation is an independent event and that the probability of dissociation is equal at all nucleotide positions. The processivity coefficient representing the length of template at 50% of RT dissociated is then determined as 1/(2*P_{d}), where P_{d} is the probability of dissociation at each nucleotide.

### Example 21—Systematic Analysis of Challenge Structures on Primer Extension (Prophetic)

[0342] To evaluate the impact of challenging templates on RT activity, a primer extension reaction is conducted as stated above, with modifications. The RNA template contains one of the following challenge motifs at fixed distance (100-300 nt) downstream of the primer binding site: homopolymeric stretches, thermodynamically stable GC-rich stem loop, pseudoknot, tRNA, GII intron, and RNA template containing base or backbone modifications (e.g. pseudouridine, phosphothiorate bonds). After quenching the reaction, the size distribution of cDNA products is analyzed by denaturing polyacrylamide gel. An adapter sequence is also unbiasedly ligated to the 3′ ends of the cDNA products using T4 ligase. The ligated product(s) are then PCR-amplified and library prepped for next generation sequencing to identify both sites of RT misincorporation/insertions/deletions and sites of RT drop-off with single nucleotide resolution. Extent of RT drop-off at a given position is quantified by comparing the number of sequencing reads corresponding to the drop-off product to the number of sequencing reads corresponding to the full-length product.

### Example 22—Evaluating Non-Templated Base Additions (Prophetic)

[0343] Non-templated addition of bases to the 5′ end of the cDNA product is evaluated by next generation sequencing. Primer extension reactions containing the RT derived from the cell-free expression system and RNA template are conducted as described above. Systematic analysis of different RNA template lengths and sequence motifs at the 5′ end are tested. An adapter sequence is unbiasedly ligated to the 3′ ends of the resulting cDNA products by T4 ligase, resulting in capture of all cDNA products despite the potential heterogeneous nature of their 3′ ends. The ligated product(s) are then PCR-amplified and library prepped for next generation sequencing. Comparison of the expected full-length cDNA reference sequence to experimentally produced cDNA sequences that are longer than full-length enable identification of both the type and number of base additions to the 5′-end that were not templated by the RNA.

### Example 23—Determining 5′ and 3′ UTR Parameters for Activity and Processivity for R2, Non-LTR, and Similar Systems (Prophetic)

[0344] Proteins of interest are purified via a Twin-strep tag after IPTG-induced overexpression in E. coli. Purified proteins are tested against 1 kb and 4 kb cargos flanked by the 3′ UTRs identified from their native contexts and the 5′ UTRs plus 400 bp past the start codon. The 5′ and 3′ flanking sequences' effect on activity is assayed via qPCR to sections near the end of the template to determine if cargos with these native features produce superior results.

### Example 24—RT cDNA Synthesis Activity can be Harnessed for Multiple Applications (Prophetic)

[0345] Processes dependent on RNA are important in biology, such as expression, processing, modifications, and half-life. Quality control procedures in biotechnology performed on RNA utilize conversion of RNA to cDNA. Therefore, multiple RTs have been used for the production of cDNA libraries over the years. Commercially available RTs used for these purposes include the MMLV RT, AMV RT, and GsI-IIC RT (TGIRT). The first two represent retroviral RTs, while the latter is a GII intron derived RT. GII intron derived RTs, as well as non-LTR derived RTs, show several advantages compared to their retroviral counterparts. For example, they are more processive, reading through structural and modified RNAs. Structural or modified RNAs may not be optimal substrates for retroviral RTs, as they create early termination products that can be misinterpreted as RNA fragments. In addition, the ability to template switch of some RTs can be harnessed for early adaptor addition, making the adaptor ligation procedures less important during library preparation. Therefore, highly processive RTs are suitable for the generation of libraries with complex RNA. Further, some highly processive RTs are generally smaller than currently used retroviral RTs, making their production and associated downstream processes easier. Several novel RTs described herein outperform the commercially available TGIRT enzyme, some with over 10-fold its cDNA synthesis activity. As such, many of these novel RTs show great promise for their commercial application for cDNA synthesis kits.

[0346] While preferred embodiments of the present invention have been shown and described herein, it will be obvious to those skilled in the art that such embodiments are provided by way of example only. It is not intended that the invention be limited by the specific examples provided within the specification. While the invention has been described with reference to the aforementioned specification, the descriptions and illustrations of the embodiments herein are not meant to be construed in a limiting sense. Numerous variations, changes, and substitutions will now occur to those skilled in the art without departing from the invention. Furthermore, it shall be understood that all aspects of the invention are not limited to the specific depictions, configurations or relative proportions set forth herein which depend upon a variety of conditions and variables. It should be understood that various alternatives to the embodiments of the invention described herein may be employed in practicing the invention. It is therefore contemplated that the invention shall also cover any such alternatives, modifications, variations or equivalents. It is intended that the following claims define the scope of the invention and that methods and structures within the scope of these claims and their equivalents be covered thereby.

TABLE 3
Protein and nucleic acid sequences referred to herein

| | Sequence | SEQ ID | | |
|---|---|---|---|---|
| Cat. | Number | NO: | Description | Type |
| MG140 transposition proteins | | 1 | MG140-1-R2 transposition protein | protein |
| MG140 transposition proteins | | 2 | MG140-2-R2 transposition protein | protein |
| MG140 transposition proteins | | 3 | MG140-3-R2 transposition protein | protein |
| MG140 transposition proteins | | 4 | MG140-4-R2 transposition protein | protein |
| MG140 transposition proteins | | 5 | MG140-5-R2 transposition protein | protein |
| MG140 transposition proteins | | 6 | MG140-6-R2 transposition protein | protein |
| MG140 transposition proteins | | 7 | MG140-7-R2 transposition protein | protein |
| MG140 transposition proteins | | 8 | MG140-8-R2 transposition protein | protein |
| MG140 transposition proteins | | 9 | MG140-147 transposition protein | protein |
| MG140 transposition proteins | | 10 | MG140-9-R2 transposition protein | protein |
| MG140 transposition proteins | | 11 | MG140-10-R2 transposition protein | protein |
| MG140 transposition proteins | | 12 | MG140-11-R2 transposition protein | protein |
| MG140 transposition proteins | | 13 | MG140-12-R2 transposition protein | protein |
| MG140 transposition proteins | | 14 | MG140-13-R2 transposition protein | protein |
| MG140 transposition proteins | | 15 | MG140-14-R2 transposition protein | protein |
| MG140 transposition proteins | | 16 | MG140-15-R2 transposition protein | protein |
| MG140 transposition proteins | | 17 | MG140-16-R2 transposition protein | protein |
| MG140 transposition proteins | | 18 | MG140-17-R2 transposition protein | protein |
| MG140 transposition proteins | | 19 | MG140-18-R2 transposition protein | protein |
| MG140 transposition proteins | | 20 | MG140-19-R2 transposition protein | protein |
| MG140 transposition proteins | | 21 | MG140-20-R2 transposition protein | protein |
| MG140 transposition proteins | | 22 | MG140-21-R2 transposition protein | protein |
| MG140 transposition proteins | | 23 | MG140-22-R2 transposition protein | protein |
| MG140 transposition proteins | | 24 | MG140-23-R2 transposition protein | protein |
| MG140 transposition proteins | | 25 | MG140-24-R2 transposition protein | protein |
| MG140 transposition proteins | | 26 | MG140-25-R2 transposition protein | protein |
| MG140 transposition proteins | | 27 | MG140-26-R2 transposition protein | protein |
| MG140 transposition proteins | | 28 | MG140-27-R2 transposition protein | protein |
| MG140 transposition proteins | | 29 | MG140-28-R2 transposition protein | protein |
| MG153 RT MCP fusions | | 30 | FH-MCP-MG153-1 | nucleotide |
| MG153 RT MCP fusions | | 31 | FH-MCP-MG153-2 | nucleotide |
| MG153 RT MCP fusions | | 32 | FH-MCP-MG153-3 | nucleotide |
| Nanoluciferase templates | | 33 | Nanoluciferase Template | nucleotide |
| Complementary DNA primers | | 34 | Complementary DNA primer | nucleotide |
| PCR primers | | 35 | Forward primer for 100/542 bp amplicon | nucleotide |
| PCR primers | | 36 | Reverse primer for 100 bp amplicon | nucleotide |
| PCR primers | | 37 | Reverse primer for 542 bp amplicon | nucleotide |
| PCR amplicons derived from | | 38 | 100 bp amplicon | nucleotide |
| cDNA | | | | |
| PCR amplicons derived from | | 39 | 542 bp amplicon | nucleotide |
| cDNA | | | | |
| MG153 RT MCP fusions | | 40 | FH-MCP-MG153-4 | nucleotide |
| MG153 RT MCP fusions | | 41 | FH-MCP-MG153-7 | nucleotide |
| MG153 RT MCP fusions | | 42 | FH-MCP-MG153-8 | nucleotide |
| MG153 RT MCP fusions | | 43 | FH-MCP-MG153-9 | nucleotide |
| MG153 RT MCP fusions | | 44 | FH-MCP-MG153-10 | nucleotide |
| MG153 RT MCP fusions | | 45 | FH-MCP-MG153-11 | nucleotide |
| MG153 RT MCP fusions | | 46 | FH-MCP-MG153-12 | nucleotide |
| MG153 RT MCP fusions | | 47 | FH-MCP-MG153-13 | nucleotide |
| MG153 RT MCP fusions | | 48 | FH-MCP-MG153-15 | nucleotide |
| MG153 RT MCP fusions | | 49 | FH-MCP-MG153-16 | nucleotide |
| MG153 RT MCP fusions | | 50 | FH-MCP-MG153-21 | nucleotide |
| primer to amplify from | | 51 | LA_061_pmgx_txtl_rv | nucleotide |
| pET21(+) | | | | |
| primer to amplify from | | 52 | LA_062_pmgx_txtl_fw | nucleotide |
| pET21(+) | | | | |
| RT RNA template | | 53 | Structured RT template RNA to emx1 | nucleotide |
| RT RNA template | | 54 | Structured RT template RNA to emx1 | nucleotide |
| | | | (5′ truncated) | |
| RT RNA template | | 55 | Small RT template | nucleotide |
| FAM-labeled oligo for cDNA | | 56 | LA321_282_FAM | nucleotide |
| assay | | | | |
| NGS primer | | 57 | LA065_NGS_enrich_fw | nucleotide |
| NGS primer | | 58 | LA395_282_NGS | nucleotide |
| NGS primer | | 59 | LA396_RT_short_NGS | nucleotide |
| FAM-labeled oligo for cDNA | A60 | | LA423_emx1_6 pbs | nucleotide |
| assay | | | | |
| FAM-labeled oligo for cDNA | A61 | | LA424_emx1_8 pbs | nucleotide |
| assay | | | | |
| FAM-labeled oligo for cDNA | | 62 | LA425_emx1_10 pbs | nucleotide |
| assay | | | | |
| FAM-labeled oligo for cDNA | | 63 | LA426_emx1_13 pbs | nucleotide |
| assay | | | | |
| FAM-labeled oligo for cDNA | | 64 | LA427_emx1_20 pbs | nucleotide |
| assay | | | | |
| UMI primer for NGS fidelity | | 65 | LA430_umi_cdna | nucleotide |
| MG153 Strep tagged genes | | 66 | Nstrep-MG153-1 | nucleotide |
| MG153 Strep tagged genes | | 67 | Nstrep-MG153-2 | nucleotide |
| MG153 Strep tagged genes | | 68 | Nstrep-MG153-3 | nucleotide |
| MG153 Strep tagged genes | | 69 | Nstrep-MG153-4 | nucleotide |
| MG153 Strep tagged genes | | 70 | Nstrep-MG153-5 | nucleotide |
| MG153 Strep tagged genes | | 71 | Nstrep-MG153-6 | nucleotide |
| MG153 Strep tagged genes | | 72 | Nstrep-MG153-7 | nucleotide |
| MG153 Strep tagged genes | | 73 | Nstrep-MG153-8 | nucleotide |
| MG153 Strep tagged genes | | 74 | Nstrep-MG153-9 | nucleotide |
| MG153 Strep tagged genes | | 75 | Nstrep-MG153-10 | nucleotide |
| MG153 Strep tagged genes | | 76 | Nstrep-MG153-11 | nucleotide |
| MG153 Strep tagged genes | | 77 | Nstrep-MG153-12 | nucleotide |
| MG153 Strep tagged genes | | 78 | Nstrep-MG153-13 | nucleotide |
| MG153 Strep tagged genes | | 79 | Nstrep-MG153-14 | nucleotide |
| MG153 Strep tagged genes | | 80 | Nstrep-MG153-15 | nucleotide |
| MG153 Strep tagged genes | | 81 | Nstrep-MG153-16 | nucleotide |
| MG153 Strep tagged genes | | 82 | Nstrep-MG153-17 | nucleotide |
| MG153 Strep tagged genes | | 83 | Nstrep-MG153-18 | nucleotide |
| MG153 Strep tagged genes | | 84 | Nstrep-MG153-19 | nucleotide |
| MG153 Strep tagged genes | | 85 | Nstrep-MG153-20 | nucleotide |
| MG153 Strep tagged genes | | 86 | Nstrep-MG153-21 | nucleotide |
| MG153 Strep tagged genes | | 87 | Nstrep-MG153-25 | nucleotide |
| MG153 Strep tagged genes | | 88 | Nstrep-MG153-26 | nucleotide |
| MG153 Strep tagged genes | | 89 | Nstrep-MG153-27 | nucleotide |
| MG153 Strep tagged genes | | 90 | Nstrep-MG153-28 | nucleotide |
| MG153 Strep tagged genes | | 91 | Nstrep-MG153-29 | nucleotide |
| MG153 Strep tagged genes | | 92 | Nstrep-MG153-30 | nucleotide |
| MG153 Strep tagged genes | | 93 | Nstrep-MG153-31 | nucleotide |
| MG153 Strep tagged genes | | 94 | Nstrep-MG153-32 | nucleotide |
| MG153 Strep tagged genes | | 95 | Nstrep-MG153-33 | nucleotide |
| MG153 Strep tagged genes | | 96 | Nstrep-MG153-34 | nucleotide |
| MG153 Strep tagged genes | | 97 | Nstrep-MG153-35 | nucleotide |
| MG153 Strep tagged genes | | 98 | Nstrep-MG153-36 | nucleotide |
| MG153 Strep tagged genes | | 99 | Nstrep-MG153-37 | nucleotide |
| MG153 Strep tagged genes | | 100 | Nstrep-MG153-38 | nucleotide |
| MG153 Strep tagged genes | | 101 | Nstrep-MG153-39 | nucleotide |
| MG153 Strep tagged genes | | 102 | Nstrep-MG153-40 | nucleotide |
| MG153 Strep tagged genes | | 103 | Nstrep-MG153-41 | nucleotide |
| MG153 Strep tagged genes | | 104 | Nstrep-MG153-42 | nucleotide |
| MG153 Strep tagged genes | | 105 | Nstrep-MG153-43 | nucleotide |
| MG153 Strep tagged genes | | 106 | Nstrep-MG153-44 | nucleotide |
| MG153 Strep tagged genes | | 107 | Nstrep-MG153-45 | nucleotide |
| MG153 Strep tagged genes | | 108 | Nstrep-MG153-46 | nucleotide |
| MG153 Strep tagged genes | | 109 | Nstrep-MG153-47 | nucleotide |
| MG153 Strep tagged genes | | 110 | Nstrep-MG153-48 | nucleotide |
| MG153 Strep tagged genes | | 111 | Nstrep-MG153-49 | nucleotide |
| MG153 Strep tagged genes | | 112 | Nstrep-MG153-50 | nucleotide |
| MG153 Strep tagged genes | | 113 | Nstrep-MG153-51 | nucleotide |
| MG153 Strep tagged genes | | 114 | Nstrep-MG153-52 | nucleotide |
| MG153 Strep tagged genes | | 115 | Nstrep-MG153-53 | nucleotide |
| MG153 Strep tagged genes | | 116 | Nstrep-MG153-54 | nucleotide |
| MG153 Strep tagged genes | | 117 | Nstrep-MG153-55 | nucleotide |
| MG153 Strep tagged genes | | 118 | Nstrep-MG153-56 | nucleotide |
| MG153 Strep tagged genes | | 119 | Nstrep-MG153-57 | nucleotide |
| MG153 E. coli codon | | 120 | MG153-1 | nucleotide |
| optimized genes | | | | |
| MG153 E. coli codon | | 121 | MG153-2 | nucleotide |
| optimized genes | | | | |
| MG153 E. coli codon | | 122 | MG153-3 | nucleotide |
| optimized genes | | | | |
| MG153 E. coli codon | | 123 | MG153-4 | nucleotide |
| optimized genes | | | | |
| MG153 E. coli codon | | 124 | MG153-5 | nucleotide |
| optimized genes | | | | |
| MG153 E. coli codon | | 125 | MG153-6 | nucleotide |
| optimized genes | | | | |
| MG153 E. coli codon | | 126 | MG153-7 | nucleotide |
| optimized genes | | | | |
| MG153 E. coli codon | | 127 | MG153-8 | nucleotide |
| optimized genes | | | | |
| MG153 E. coli codon | | 128 | MG153-9 | nucleotide |
| optimized genes | | | | |
| MG153 E. coli codon | | 129 | MG153-10 | nucleotide |
| optimized genes | | | | |
| MG153 E. coli codon | | 130 | MG153-11 | nucleotide |
| optimized genes | | | | |
| MG153 E. coli codon | | 131 | MG153-12 | nucleotide |
| optimized genes | | | | |
| MG153 E. coli codon | | 132 | MG153-13 | nucleotide |
| optimized genes | | | | |
| MG153 E. coli codon | | 133 | MG153-14 | nucleotide |
| optimized genes | | | | |
| MG153 E. coli codon | | 134 | MG153-15 | nucleotide |
| optimized genes | | | | |
| MG153 E. coli codon | | 135 | MG153-16 | nucleotide |
| optimized genes | | | | |
| MG153 E. coli codon | | 136 | MG153-17 | nucleotide |
| optimized genes | | | | |
| MG153 E. coli codon | | 137 | MG153-18 | nucleotide |
| optimized genes | | | | |
| MG153 E. coli codon | | 138 | MG153-19 | nucleotide |
| optimized genes | | | | |
| MG153 E. coli codon | | 139 | MG153-20 | nucleotide |
| optimized genes | | | | |
| MG153 E. coli codon | | 140 | MG153-21 | nucleotide |
| optimized genes | | | | |
| MG153 E. coli codon | | 141 | MG153-25 | nucleotide |
| optimized genes | | | | |
| MG153 E. coli codon | | 142 | MG153-26 | nucleotide |
| optimized genes | | | | |
| MG153 E. coli codon | | 143 | MG153-27 | nucleotide |
| optimized genes | | | | |
| MG153 E. coli codon | | 144 | MG153-28 | nucleotide |
| optimized genes | | | | |
| MG153 E. coli codon | | 145 | MG153-29 | nucleotide |
| optimized genes | | | | |
| MG153 E. coli codon | | 146 | MG153-30 | nucleotide |
| optimized genes | | | | |
| MG153 E. coli codon | | 147 | MG153-31 | nucleotide |
| optimized genes | | | | |
| MG153 E. coli codon | | 148 | MG153-32 | nucleotide |
| optimized genes | | | | |
| MG153 E. coli codon | | 149 | MG153-33 | nucleotide |
| optimized genes | | | | |
| MG153 E. coli codon | | 150 | MG153-34 | nucleotide |
| optimized genes | | | | |
| MG153 E. coli codon | | 151 | MG153-35 | nucleotide |
| optimized genes | | | | |
| MG153 E. coli codon | | 152 | MG153-36 | nucleotide |
| optimized genes | | | | |
| MG153 E. coli codon | | 153 | MG153-37 | nucleotide |
| optimized genes | | | | |
| MG153 E. coli codon | | 154 | MG153-38 | nucleotide |
| optimized genes | | | | |
| MG153 E. coli codon | | 155 | MG153-39 | nucleotide |
| optimized genes | | | | |
| MG153 E. coli codon | | 156 | MG153-40 | nucleotide |
| optimized genes | | | | |
| MG153 E. coli codon | | 157 | MG153-41 | nucleotide |
| optimized genes | | | | |
| MG153 E. coli codon | | 158 | MG153-42 | nucleotide |
| optimized genes | | | | |
| MG153 E. coli codon | | 159 | MG153-43 | nucleotide |
| optimized genes | | | | |
| MG153 E. coli codon | | 160 | MG153-44 | nucleotide |
| optimized genes | | | | |
| MG153 E. coli codon | | 161 | MG153-45 | nucleotide |
| optimized genes | | | | |
| MG153 E. coli codon | | 162 | MG153-46 | nucleotide |
| optimized genes | | | | |
| MG153 E. coli codon | | 163 | MG153-47 | nucleotide |
| optimized genes | | | | |
| MG153 E. coli codon | | 164 | MG153-48 | nucleotide |
| optimized genes | | | | |
| MG153 E. coli codon | | 165 | MG153-49 | nucleotide |
| optimized genes | | | | |
| MG153 E. coli codon | | 166 | MG153-50 | nucleotide |
| optimized genes | | | | |
| MG153 E. coli codon | | 167 | MG153-51 | nucleotide |
| optimized genes | | | | |
| MG153 E. coli codon | | 168 | MG153-52 | nucleotide |
| optimized genes | | | | |
| MG153 E. coli codon | | 169 | MG153-53 | nucleotide |
| optimized genes | | | | |
| MG153 E. coli codon | | 170 | MG153-54 | nucleotide |
| optimized genes | | | | |
| MG153 E. coli codon | | 171 | MG153-55 | nucleotide |
| optimized genes | | | | |
| MG153 E. coli codon | | 172 | MG153-56 | nucleotide |
| optimized genes | | | | |
| MG153 E. coli codon | | 173 | MG153-57 | nucleotide |
| optimized genes | | | | |
| MG160 Strep tagged genes | | 174 | Nstrep-MG160-1 | nucleotide |
| MG160 Strep tagged genes | | 175 | Nstrep-MG160-2 | nucleotide |
| MG160 Strep tagged genes | | 176 | Nstrep-MG160-3 | nucleotide |
| MG160 Strep tagged genes | | 177 | Nstrep-MG160-4 | nucleotide |
| MG160 Strep tagged genes | | 178 | Nstrep-MG160-5 | nucleotide |
| MG160 Strep tagged genes | | 179 | Nstrep-MG160-6 | nucleotide |
| MG160 Strep tagged genes | | 180 | Nstrep-MG160-8 | nucleotide |
| MG160 E. coli codon | | 181 | MG160-1 | nucleotide |
| optimized genes | | | | |
| MG160 E. coli codon | | 182 | MG160-2 | nucleotide |
| optimized genes | | | | |
| MG160 E. coli codon | | 183 | MG160-3 | nucleotide |
| optimized genes | | | | |
| MG160 E. coli codon | | 184 | MG160-4 | nucleotide |
| optimized genes | | | | |
| MG160 E. coli codon | | 185 | MG160-5 | nucleotide |
| optimized genes | | | | |
| MG160 E. coli codon | | 186 | MG160-6 | nucleotide |
| optimized genes | | | | |
| MG160 E. coli codon | | 187 | MG160-8 | nucleotide |
| optimized genes | | | | |
| MG163 Strep tagged genes | | 188 | Nstrep-MG163-1 | nucleotide |
| MG163 Strep tagged genes | | 189 | Nstrep-MG163-2 | nucleotide |
| MG163 Strep tagged genes | | 190 | Nstrep-MG163-3 | nucleotide |
| MG163 Strep tagged genes | | 191 | Nstrep-MG163-4 | nucleotide |
| MG163 Strep tagged genes | | 192 | Nstrep-MG163-5 | nucleotide |
| MG163 E. coli codon | | 193 | MG163-1 | nucleotide |
| optimized genes | | | | |
| MG163 E. coli codon | | 194 | MG163-2 | nucleotide |
| optimized genes | | | | |
| MG163 E. coli codon | | 195 | MG163-3 | nucleotide |
| optimized genes | | | | |
| MG163 E. coli codon | | 196 | MG163-4 | nucleotide |
| optimized genes | | | | |
| MG163 E. coli codon | | 197 | MG163-5 | nucleotide |
| optimized genes | | | | |
| MG164 Strep tagged genes | | 198 | Nstrep-MG164-1 | nucleotide |
| MG164 Strep tagged genes | | 199 | Nstrep-MG164-2 | nucleotide |
| MG164 Strep tagged genes | | 200 | Nstrep-MG164-3 | nucleotide |
| MG164 Strep tagged genes | | 201 | Nstrep-MG164-4 | nucleotide |
| MG164 Strep tagged genes | | 202 | Nstrep-MG164-5 | nucleotide |
| MG164 E. coli codon | | 203 | MG164-1 | nucleotide |
| optimized genes | | | | |
| MG164 E. coli codon | | 204 | MG164-2 | nucleotide |
| optimized genes | | | | |
| MG164 E. coli codon | | 205 | MG164-3 | nucleotide |
| optimized genes | | | | |
| MG164 E. coli codon | | 206 | MG164-4 | nucleotide |
| optimized genes | | | | |
| MG164 E. coli codon | | 207 | MG164-5 | nucleotide |
| optimized genes | | | | |
| MG165 Strep tagged genes | | 208 | Nstrep-MG165-1 | nucleotide |
| MG165 Strep tagged genes | | 209 | Nstrep-MG165-2 | nucleotide |
| MG165 Strep tagged genes | | 210 | Nstrep-MG165-3 | nucleotide |
| MG165 Strep tagged genes | | 211 | Nstrep-MG165-4 | nucleotide |
| MG165 Strep tagged genes | | 212 | Nstrep-MG165-5 | nucleotide |
| MG165 Strep tagged genes | | 213 | Nstrep-MG165-6 | nucleotide |
| MG165 Strep tagged genes | | 214 | Nstrep-MG165-7 | nucleotide |
| MG165 Strep tagged genes | | 215 | Nstrep-MG165-8 | nucleotide |
| MG165 Strep tagged genes | | 216 | Nstrep-MG165-9 | nucleotide |
| MG165 E. coli codon | | 217 | MG165-1 | nucleotide |
| optimized genes | | | | |
| MG165 E. coli codon | | 218 | MG165-2 | nucleotide |
| optimized genes | | | | |
| MG165 E. coli codon | | 219 | MG165-3 | nucleotide |
| optimized genes | | | | |
| MG165 E. coli codon | | 220 | MG165-4 | nucleotide |
| optimized genes | | | | |
| MG165 E. coli codon | | 221 | MG165-5 | nucleotide |
| optimized genes | | | | |
| MG165 E. coli codon | | 222 | MG165-6 | nucleotide |
| optimized genes | | | | |
| MG165 E. coli codon | | 223 | MG165-7 | nucleotide |
| optimized genes | | | | |
| MG165 E. coli codon | | 224 | MG165-8 | nucleotide |
| optimized genes | | | | |
| MG165 E. coli codon | | 225 | MG165-9 | nucleotide |
| optimized genes | | | | |
| MG166 Strep tagged genes | | 226 | Nstrep-MG166-1 | nucleotide |
| MG166 Strep tagged genes | | 227 | Nstrep-MG166-2 | nucleotide |
| MG166 Strep tagged genes | | 228 | Nstrep-MG166-3 | nucleotide |
| MG166 Strep tagged genes | | 229 | Nstrep-MG166-4 | nucleotide |
| MG166 Strep tagged genes | | 230 | Nstrep-MG166-5 | nucleotide |
| MG166 E. coli codon | | 231 | MG166-1 | nucleotide |
| optimized genes | | | | |
| MG166 E. coli codon | | 232 | MG166-2 | nucleotide |
| optimized genes | | | | |
| MG166 E. coli codon | | 233 | MG166-3 | nucleotide |
| optimized genes | | | | |
| MG166 E. coli codon | | 234 | MG166-4 | nucleotide |
| optimized genes | | | | |
| MG166 E. coli codon | | 235 | MG166-5 | nucleotide |
| optimized genes | | | | |
| MG167 Strep tagged genes | | 236 | Nstrep-MG167-1 | nucleotide |
| MG167 Strep tagged genes | | 237 | Nstrep-MG167-2 | nucleotide |
| MG167 Strep tagged genes | | 238 | Nstrep-MG167-3 | nucleotide |
| MG167 Strep tagged genes | | 239 | Nstrep-MG167-4 | nucleotide |
| MG167 Strep tagged genes | | 240 | Nstrep-MG167-5 | nucleotide |
| MG167 E. coli codon | | 241 | MG167-1 | nucleotide |
| optimized genes | | | | |
| MG167 E. coli codon | | 242 | MG167-2 | nucleotide |
| optimized genes | | | | |
| MG167 E. coli codon | | 243 | MG167-3 | nucleotide |
| optimized genes | | | | |
| MG167 E. coli codon | | 244 | MG167-4 | nucleotide |
| optimized genes | | | | |
| MG167 E. coli codon | | 245 | MG167-5 | nucleotide |
| optimized genes | | | | |
| MG168 Strep tagged genes | | 246 | Nstrep-MG168-1 | nucleotide |
| MG168 Strep tagged genes | | 247 | Nstrep-MG168-2 | nucleotide |
| MG168 Strep tagged genes | | 248 | Nstrep-MG168-3 | nucleotide |
| MG168 Strep tagged genes | | 249 | Nstrep-MG168-4 | nucleotide |
| MG168 Strep tagged genes | | 250 | Nstrep-MG168-5 | nucleotide |
| MG168 E. coli codon | | 251 | MG168-1 | nucleotide |
| optimized genes | | | | |
| MG168 E. coli codon | | 252 | MG168-2 | nucleotide |
| optimized genes | | | | |
| MG168 E. coli codon | | 253 | MG168-3 | nucleotide |
| optimized genes | | | | |
| MG168 E. coli codon | | 254 | MG168-4 | nucleotide |
| optimized genes | | | | |
| MG168 E. coli codon | | 255 | MG168-5 | nucleotide |
| optimized genes | | | | |
| MG169 Strep tagged genes | | 256 | Nstrep-MG169-1 | nucleotide |
| MG169 Strep tagged genes | | 257 | Nstrep-MG169-2 | nucleotide |
| MG169 Strep tagged genes | | 258 | Nstrep-MG169-3 | nucleotide |
| MG169 Strep tagged genes | | 259 | Nstrep-MG169-4 | nucleotide |
| MG169 Strep tagged genes | | 260 | Nstrep-MG169-5 | nucleotide |
| MG169 Strep tagged genes | | 261 | Nstrep-MG169-6 | nucleotide |
| MG169 Strep tagged genes | | 262 | Nstrep-MG169-7 | nucleotide |
| MG169 Strep tagged genes | | 263 | Nstrep-MG169-8 | nucleotide |
| MG169 Strep tagged genes | | 264 | Nstrep-MG169-9 | nucleotide |
| MG169 Strep tagged genes | | 265 | Nstrep-MG169-10 | nucleotide |
| MG169 Strep tagged genes | | 266 | Nstrep-MG169-11 | nucleotide |
| MG169 E. coli codon | | 267 | MG169-1 | nucleotide |
| optimized genes | | | | |
| MG169 E. coli codon | | 268 | MG169-2 | nucleotide |
| optimized genes | | | | |
| MG169 E. coli codon | | 269 | MG169-3 | nucleotide |
| optimized genes | | | | |
| MG169 E. coli codon | | 270 | MG169-4 | nucleotide |
| optimized genes | | | | |
| MG169 E. coli codon | | 271 | MG169-5 | nucleotide |
| optimized genes | | | | |
| MG169 E. coli codon | | 272 | MG169-6 | nucleotide |
| optimized genes | | | | |
| MG169 E. coli codon | | 273 | MG169-7 | nucleotide |
| optimized genes | | | | |
| MG169 E. coli codon | | 274 | MG169-8 | nucleotide |
| optimized genes | | | | |
| MG169 E. coli codon | | 275 | MG169-9 | nucleotide |
| optimized genes | | | | |
| MG169 E. coli codon | | 276 | MG169-10 | nucleotide |
| optimized genes | | | | |
| MG169 E. coli codon | | 277 | MG169-11 | nucleotide |
| optimized genes | | | | |
| MG170 Strep tagged genes | | 278 | Nstrep-MG170-1 | nucleotide |
| MG170 Strep tagged genes | | 279 | Nstrep-MG170-2 | nucleotide |
| MG170 Strep tagged genes | | 280 | Nstrep-MG170-3 | nucleotide |
| MG170 Strep tagged genes | | 281 | Nstrep-MG170-4 | nucleotide |
| MG170 Strep tagged genes | | 282 | Nstrep-MG170-5 | nucleotide |
| MG170 Strep tagged genes | | 283 | Nstrep-MG170-6 | nucleotide |
| MG170 Strep tagged genes | | 284 | Nstrep-MG170-7 | nucleotide |
| MG170 Strep tagged genes | | 285 | Nstrep-MG170-8 | nucleotide |
| MG170 Strep tagged genes | | 286 | Nstrep-MG170-9 | nucleotide |
| MG170 Strep tagged genes | | 287 | Nstrep-MG170-10 | nucleotide |
| MG170 E. coli codon | | 288 | MG170-1 | nucleotide |
| optimized genes | | | | |
| MG170 E. coli codon | | 289 | MG170-2 | nucleotide |
| optimized genes | | | | |
| MG170 E. coli codon | | 290 | MG170-3 | nucleotide |
| optimized genes | | | | |
| MG170 E. coli codon | | 291 | MG170-4 | nucleotide |
| optimized genes | | | | |
| MG170 E. coli codon | | 292 | MG170-5 | nucleotide |
| optimized genes | | | | |
| MG170 E. coli codon | | 293 | MG170-6 | nucleotide |
| optimized genes | | | | |
| MG170 E. coli codon | | 294 | MG170-7 | nucleotide |
| optimized genes | | | | |
| MG170 E. coli codon | | 295 | MG170-8 | nucleotide |
| optimized genes | | | | |
| MG170 E. coli codon | | 296 | MG170-9 | nucleotide |
| optimized genes | | | | |
| MG170 E. coli codon | | 297 | MG170-10 | nucleotide |
| optimized genes | | | | |
| MG172 Strep tagged genes | | 298 | Nstrep-MG172-1 | nucleotide |
| MG172 Strep tagged genes | | 299 | Nstrep-MG172-2 | nucleotide |
| MG172 Strep tagged genes | | 300 | Nstrep-MG172-3 | nucleotide |
| MG172 Strep tagged genes | | 301 | Nstrep-MG172-4 | nucleotide |
| MG172 Strep tagged genes | | 302 | Nstrep-MG172-5 | nucleotide |
| MG172 E. coli codon | | 303 | MG172-1 | nucleotide |
| optimized genes | | | | |
| MG172 E. coli codon | | 304 | MG172-2 | nucleotide |
| optimized genes | | | | |
| MG172 E. coli codon | | 305 | MG172-3 | nucleotide |
| optimized genes | | | | |
| MG172 E. coli codon | | 306 | MG172-4 | nucleotide |
| optimized genes | | | | |
| MG172 E. coli codon | | 307 | MG172-5 | nucleotide |
| optimized genes | | | | |
| MG154 Strep tagged genes | | 308 | Nstrep-MG154-1 | nucleotide |
| MG154 Strep tagged genes | | 309 | Nstrep-MG154-2 | nucleotide |
| MG155 Strep tagged genes | | 310 | Nstrep-MG155-1 | nucleotide |
| MG155 Strep tagged genes | | 311 | Nstrep-MG155-2 | nucleotide |
| MG155 Strep tagged genes | | 312 | Nstrep-MG155-3 | nucleotide |
| MG156 Strep tagged genes | | 313 | Nstrep-MG156-1 | nucleotide |
| MG156 Strep tagged genes | | 314 | Nstrep-MG156-2 | nucleotide |
| MG157 Strep tagged genes | | 315 | Nstrep-MG157-1 | nucleotide |
| MG157 Strep tagged genes | | 316 | Nstrep-MG157-2 | nucleotide |
| MG157 Strep tagged genes | | 317 | Nstrep-MG157-3 | nucleotide |
| MG157 Strep tagged genes | | 318 | Nstrep-MG157-4 | nucleotide |
| MG157 Strep tagged genes | | 319 | Nstrep-MG157-5 | nucleotide |
| MG158 Strep tagged genes | | 320 | Nstrep-MG158-1 | nucleotide |
| MG159 Strep tagged genes | | 321 | Nstrep-MG159-1 | nucleotide |
| MG159 Strep tagged genes | | 322 | Nstrep-MG159-2 | nucleotide |
| MG159 Strep tagged genes | | 323 | Nstrep-MG159-3 | nucleotide |
| MG154 E. coli codon | | 324 | MG154-1 | nucleotide |
| optimized genes | | | | |
| MG154 E. coli codon | | 325 | MG154-2 | nucleotide |
| optimized genes | | | | |
| MG155 E. coli codon | | 326 | MG155-1 | nucleotide |
| optimized genes | | | | |
| MG155 E. coli codon | | 327 | MG155-2 | nucleotide |
| optimized genes | | | | |
| MG155 E. coli codon | | 328 | MG155-3 | nucleotide |
| optimized genes | | | | |
| MG156 E. coli codon | | 329 | MG156-1 | nucleotide |
| optimized genes | | | | |
| MG156 E. coli codon | | 330 | MG156-2 | nucleotide |
| optimized genes | | | | |
| MG157 E. coli codon | | 331 | MG157-1 | nucleotide |
| optimized genes | | | | |
| MG157 E. coli codon | | 332 | MG157-2 | nucleotide |
| optimized genes | | | | |
| MG157 E. coli codon | | 333 | MG157-3 | nucleotide |
| optimized genes | | | | |
| MG157 E. coli codon | | 334 | MG157-4 | nucleotide |
| optimized genes | | | | |
| MG157 E. coli codon | | 335 | MG157-5 | nucleotide |
| optimized genes | | | | |
| MG158 E. coli codon | | 336 | MG158-1 | nucleotide |
| optimized genes | | | | |
| MG159 E. coli codon | | 337 | MG159-1 | nucleotide |
| optimized genes | | | | |
| MG159 E. coli codon | | 338 | MG159-2 | nucleotide |
| optimized genes | | | | |
| MG159 E. coli codon | | 339 | MG159-3 | nucleotide |
| optimized genes | | | | |
| MG154 ncRNA | | 340 | MG154-1_ncRNA | nucleotide |
| MG154 ncRNA | | 341 | MG154-2_ncRNA | nucleotide |
| MG155 ncRNA | | 342 | MG155-1_ncRNA | nucleotide |
| MG155 ncRNA | | 343 | MG155-2_ncRNA | nucleotide |
| MG155 ncRNA | | 344 | MG155-3_ncRNA | nucleotide |
| MG156 ncRNA | | 345 | MG156-1_ncRNA | nucleotide |
| MG156 ncRNA | | 346 | MG156-2_ncRNA | nucleotide |
| MG157 ncRNA | | 347 | MG157-1_ncRNA | nucleotide |
| MG157 ncRNA | | 348 | MG157-2_ncRNA | nucleotide |
| MG157 ncRNA | | 349 | MG157-3_ncRNA | nucleotide |
| MG157 ncRNA | | 350 | MG157-4_ncRNA | nucleotide |
| MG157 ncRNA | | 351 | MG157-5_ncRNA | nucleotide |
| MG158 ncRNA | | 352 | MG158-1_ncRNA | nucleotide |
| MG159 ncRNA | | 353 | MG159-1_ncRNA | nucleotide |
| MG159 ncRNA | | 354 | MG159-2_ncRNA | nucleotide |
| MG159 ncRNA | | 355 | MG159-3_ncRNA | nucleotide |
| MG151 TwinStrep tagged | | 356 | TwinStrep-MG151-80 | nucleotide |
| genes | | | | |
| MG151 TwinStrep tagged | | 357 | TwinStrep-MG151-81 | nucleotide |
| genes | | | | |
| MG151 TwinStrep tagged | | 358 | TwinStrep-MG151-82 | nucleotide |
| genes | | | | |
| MG151 TwinStrep tagged | | 359 | TwinStrep-MG151-83 | nucleotide |
| genes | | | | |
| MG151 TwinStrep tagged | | 360 | TwinStrep-MG151-84 | nucleotide |
| genes | | | | |
| MG151 TwinStrep tagged | | 361 | TwinStrep-MG151-85 | nucleotide |
| genes | | | | |
| MG151 TwinStrep tagged | | 362 | TwinStrep-MG151-86 | nucleotide |
| genes | | | | |
| MG151 Strep tagged genes | | 363 | Strep-MG151-87 | nucleotide |
| MG151 Strep tagged genes | | 364 | Strep-MG151-88 | nucleotide |
| MG151 Strep tagged genes | | 365 | Strep-MG151-89 | nucleotide |
| MG151 Strep tagged genes | | 366 | Strep-MG151-90 | nucleotide |
| MG151 Strep tagged genes | | 367 | Strep-MG151-91 | nucleotide |
| MG151 Strep tagged genes | | 368 | Strep-MG151-92 | nucleotide |
| MG151 Strep tagged genes | | 369 | Strep-MG151-93 | nucleotide |
| MG151 Strep tagged genes | | 370 | Strep-MG151-94 | nucleotide |
| MG151 Strep tagged genes | | 371 | Strep-MG151-95 | nucleotide |
| MG151 Strep tagged genes | | 372 | Strep-MG151-96 | nucleotide |
| MG151 Strep tagged genes | | 373 | Strep-MG151-97 | nucleotide |
| MG140 HA-His tagged genes | | 374 | MG140-1-HA-His | nucleotide |
| MG140 HA-His tagged genes | | 375 | MG140-3-HA-His | nucleotide |
| MG140 HA-His tagged genes | | 376 | MG140-4-HA-His | nucleotide |
| MG140 HA-His tagged genes | | 377 | MG140-5-HA-His | nucleotide |
| MG140 HA-His tagged genes | | 378 | MG140-6-HA-His | nucleotide |
| MG140 HA-His tagged genes | | 379 | MG140-7-HA-His | nucleotide |
| MG140 HA-His tagged genes | | 380 | MG140-8-HA-His | nucleotide |
| MG140 HA-His tagged genes | | 381 | MG140-10-HA-His | nucleotide |
| MG140 HA-His tagged genes | | 382 | MG140-13-HA-His | nucleotide |
| MG140 HA-His tagged genes | | 383 | MG140-14-HA-His | nucleotide |
| MG140 HA-His tagged genes | | 384 | MG140-45-HA-His | nucleotide |
| MG140 HA-His tagged genes | | 385 | MG140-46-HA-His | nucleotide |
| MG140 HA-His tagged genes | | 386 | MG140-47-HA-His | nucleotide |
| MG146 HA-His tagged genes | | 387 | MG146-1-HA-His | nucleotide |
| MG147 HA-His tagged genes | | 388 | MG147-1-HA-His | nucleotide |
| MG148 HA-His tagged genes | | 389 | MG148-1-HA-His | nucleotide |
| MG148 HA-His tagged genes | | 390 | MG148-2-HA-His | nucleotide |
| MG148 HA-His tagged genes | | 391 | MG148-3-HA-His | nucleotide |
| MG148 HA-His tagged genes | | 392 | MG148-4-HA-His | nucleotide |
| MG140 transposition proteins | | 393 | MG140-45 transposition protein | protein |
| MG140 transposition proteins | | 394 | MG140-46 transposition protein | protein |
| MG140 transposition proteins | | 395 | MG140-47 transposition protein | protein |
| MG140 transposition proteins | | 396 | MG140-48 transposition protein | protein |
| MG140 transposition proteins | | 397 | MG140-49 transposition protein | protein |
| MG140 transposition proteins | | 398 | MG140-50 transposition protein | protein |
| MG140 transposition proteins | | 399 | MG140-51 transposition protein | protein |
| MG140 transposition proteins | | 400 | MG140-52 transposition protein | protein |
| MG140 transposition proteins | | 401 | MG140-53 transposition protein | protein |
| MG146 transposition proteins | | 402 | MG146-1 transposition protein | protein |
| MG148 reverse transcriptase | | 403 | MG148-13 reverse transcriptase | protein |
| proteins | | | | |
| MG148 reverse transcriptase | | 404 | MG148-14 reverse transcriptase | protein |
| proteins | | | | |
| MG148 reverse transcriptase | | 405 | MG148-15 reverse transcriptase | protein |
| proteins | | | | |
| MG148 reverse transcriptase | | 406 | MG148-16 reverse transcriptase | protein |
| proteins | | | | |
| MG148 reverse transcriptase | | 407 | MG148-17 reverse transcriptase | protein |
| proteins | | | | |
| MG148 reverse transcriptase | | 408 | MG148-18 reverse transcriptase | protein |
| proteins | | | | |
| MG148 reverse transcriptase | | 409 | MG148-19 reverse transcriptase | protein |
| proteins | | | | |
| MG148 reverse transcriptase | | 410 | MG148-20 reverse transcriptase | protein |
| proteins | | | | |
| MG148 reverse transcriptase | | 411 | MG148-21 reverse transcriptase | protein |
| proteins | | | | |
| MG148 reverse transcriptase | | 412 | MG148-22 reverse transcriptase | protein |
| proteins | | | | |
| MG148 reverse transcriptase | | 413 | MG148-23 reverse transcriptase | protein |
| proteins | | | | |
| MG148 reverse transcriptase | | 414 | MG148-24 reverse transcriptase | protein |
| proteins | | | | |
| MG148 reverse transcriptase | | 415 | MG148-25 reverse transcriptase | protein |
| proteins | | | | |
| MG148 reverse transcriptase | | 416 | MG148-26 reverse transcriptase | protein |
| proteins | | | | |
| MG148 reverse transcriptase | | 417 | MG148-27 reverse transcriptase | protein |
| proteins | | | | |
| MG148 reverse transcriptase | | 418 | MG148-29 reverse transcriptase | protein |
| proteins | | | | |
| MG148 reverse transcriptase | | 419 | MG148-30 reverse transcriptase | protein |
| proteins | | | | |
| MG148 reverse transcriptase | | 420 | MG148-31 reverse transcriptase | protein |
| proteins | | | | |
| MG148 reverse transcriptase | | 421 | MG148-32 reverse transcriptase | protein |
| proteins | | | | |
| MG148 reverse transcriptase | | 422 | MG148-33 reverse transcriptase | protein |
| proteins | | | | |
| MG148 reverse transcriptase | | 423 | MG148-34 reverse transcriptase | protein |
| proteins | | | | |
| MG148 reverse transcriptase | | 424 | MG148-35 reverse transcriptase | protein |
| proteins | | | | |
| MG148 reverse transcriptase | | 425 | MG148-36 reverse transcriptase | protein |
| proteins | | | | |
| MG148 reverse transcriptase | | 426 | MG148-37 reverse transcriptase | protein |
| proteins | | | | |
| MG149 reverse transcriptase | | 427 | MG149-1 reverse transcriptase | protein |
| proteins | | | | |
| MG149 reverse transcriptase | | 428 | MG149-2 reverse transcriptase | protein |
| proteins | | | | |
| MG149 reverse transcriptase | | 429 | MG149-3 reverse transcriptase | protein |
| proteins | | | | |
| MG149 reverse transcriptase | | 430 | MG149-5 reverse transcriptase | protein |
| proteins | | | | |
| MG149 reverse transcriptase | | 431 | MG149-6 reverse transcriptase | protein |
| proteins | | | | |
| MG149 reverse transcriptase | | 432 | MG149-7 reverse transcriptase | protein |
| proteins | | | | |
| MG149 reverse transcriptase | | 433 | MG149-8 reverse transcriptase | protein |
| proteins | | | | |
| MG149 reverse transcriptase | | 434 | MG149-9 reverse transcriptase | protein |
| proteins | | | | |
| MG149 reverse transcriptase | | 435 | MG149-10 reverse transcriptase | protein |
| proteins | | | | |
| MG149 reverse transcriptase | | 436 | MG149-11 reverse transcriptase | protein |
| proteins | | | | |
| MG149 reverse transcriptase | | 437 | MG149-12 reverse transcriptase | protein |
| proteins | | | | |
| MG149 reverse transcriptase | | 438 | MG149-13 reverse transcriptase | protein |
| proteins | | | | |
| MG149 reverse transcriptase | | 439 | MG149-14 reverse transcriptase | protein |
| proteins | | | | |
| MG151 reverse transcriptase | | 440 | MG151-1 reverse transcriptase | protein |
| proteins | | | | |
| MG151 reverse transcriptase | | 441 | MG151-2 reverse transcriptase | protein |
| proteins | | | | |
| MG151 reverse transcriptase | | 442 | MG151-3 reverse transcriptase | protein |
| proteins | | | | |
| MG151 reverse transcriptase | | 443 | MG151-4 reverse transcriptase | protein |
| proteins | | | | |
| MG151 reverse transcriptase | | 444 | MG151-5 reverse transcriptase | protein |
| proteins | | | | |
| MG151 reverse transcriptase | | 445 | MG151-6 reverse transcriptase | protein |
| proteins | | | | |
| MG151 reverse transcriptase | | 446 | MG151-7 reverse transcriptase | protein |
| proteins | | | | |
| MG151 reverse transcriptase | | 447 | MG151-8 reverse transcriptase | protein |
| proteins | | | | |
| MG151 reverse transcriptase | | 448 | MG151-9 reverse transcriptase | protein |
| proteins | | | | |
| MG151 reverse transcriptase | | 449 | MG151-10 reverse transcriptase | protein |
| proteins | | | | |
| MG151 reverse transcriptase | | 450 | MG151-12 reverse transcriptase | protein |
| proteins | | | | |
| MG151 reverse transcriptase | | 451 | MG151-13 reverse transcriptase | protein |
| proteins | | | | |
| MG151 reverse transcriptase | | 452 | MG151-14 reverse transcriptase | protein |
| proteins | | | | |
| MG151 reverse transcriptase | | 453 | MG151-15 reverse transcriptase | protein |
| proteins | | | | |
| MG151 reverse transcriptase | | 454 | MG151-16 reverse transcriptase | protein |
| proteins | | | | |
| MG151 reverse transcriptase | | 455 | MG151-17 reverse transcriptase | protein |
| proteins | | | | |
| MG151 reverse transcriptase | | 456 | MG151-18 reverse transcriptase | protein |
| proteins | | | | |
| MG151 reverse transcriptase | | 457 | MG151-19 reverse transcriptase | protein |
| proteins | | | | |
| MG151 reverse transcriptase | | 458 | MG151-20 reverse transcriptase | protein |
| proteins | | | | |
| MG151 reverse transcriptase | | 459 | MG151-21 reverse transcriptase | protein |
| proteins | | | | |
| MG151 reverse transcriptase | | 460 | MG151-22 reverse transcriptase | protein |
| proteins | | | | |
| MG151 reverse transcriptase | | 461 | MG151-23 reverse transcriptase | protein |
| proteins | | | | |
| MG151 reverse transcriptase | | 462 | MG151-24 reverse transcriptase | protein |
| proteins | | | | |
| MG151 reverse transcriptase | | 463 | MG151-25 reverse transcriptase | protein |
| proteins | | | | |
| MG151 reverse transcriptase | | 464 | MG151-26 reverse transcriptase | protein |
| proteins | | | | |
| MG151 reverse transcriptase | | 465 | MG151-27 reverse transcriptase | protein |
| proteins | | | | |
| MG151 reverse transcriptase | | 466 | MG151-28 reverse transcriptase | protein |
| proteins | | | | |
| MG151 reverse transcriptase | | 467 | MG151-29 reverse transcriptase | protein |
| proteins | | | | |
| MG151 reverse transcriptase | | 468 | MG151-30 reverse transcriptase | protein |
| proteins | | | | |
| MG151 reverse transcriptase | | 469 | MG151-31 reverse transcriptase | protein |
| proteins | | | | |
| MG151 reverse transcriptase | | 470 | MG151-32 reverse transcriptase | protein |
| proteins | | | | |
| MG151 reverse transcriptase | | 471 | MG151-33 reverse transcriptase | protein |
| proteins | | | | |
| MG151 reverse transcriptase | | 472 | MG151-34 reverse transcriptase | protein |
| proteins | | | | |
| MG151 reverse transcriptase | | 473 | MG151-35 reverse transcriptase | protein |
| proteins | | | | |
| MG151 reverse transcriptase | | 474 | MG151-36 reverse transcriptase | protein |
| proteins | | | | |
| MG151 reverse transcriptase | | 475 | MG151-37 reverse transcriptase | protein |
| proteins | | | | |
| MG151 reverse transcriptase | | 476 | MG151-38 reverse transcriptase | protein |
| proteins | | | | |
| MG151 reverse transcriptase | | 477 | MG151-39 reverse transcriptase | protein |
| proteins | | | | |
| MG151 reverse transcriptase | | 478 | MG151-40 reverse transcriptase | protein |
| proteins | | | | |
| MG151 reverse transcriptase | | 479 | MG151-41 reverse transcriptase | protein |
| proteins | | | | |
| MG151 reverse transcriptase | | 480 | MG151-42 reverse transcriptase | protein |
| proteins | | | | |
| MG151 reverse transcriptase | | 481 | MG151-43 reverse transcriptase | protein |
| proteins | | | | |
| MG151 reverse transcriptase | | 482 | MG151-44 reverse transcriptase | protein |
| proteins | | | | |
| MG151 reverse transcriptase | | 483 | MG151-45 reverse transcriptase | protein |
| proteins | | | | |
| MG151 reverse transcriptase | | 484 | MG151-46 reverse transcriptase | protein |
| proteins | | | | |
| MG151 reverse transcriptase | | 485 | MG151-47 reverse transcriptase | protein |
| proteins | | | | |
| MG151 reverse transcriptase | | 486 | MG151-48 reverse transcriptase | protein |
| proteins | | | | |
| MG151 reverse transcriptase | | 487 | MG151-49 reverse transcriptase | protein |
| proteins | | | | |
| MG151 reverse transcriptase | | 488 | MG151-50 reverse transcriptase | protein |
| proteins | | | | |
| MG151 reverse transcriptase | | 489 | MG151-51 reverse transcriptase | protein |
| proteins | | | | |
| MG151 reverse transcriptase | | 490 | MG151-52 reverse transcriptase | protein |
| proteins | | | | |
| MG151 reverse transcriptase | | 491 | MG151-53 reverse transcriptase | protein |
| proteins | | | | |
| MG151 reverse transcriptase | | 492 | MG151-54 reverse transcriptase | protein |
| proteins | | | | |
| MG151 reverse transcriptase | | 493 | MG151-55 reverse transcriptase | protein |
| proteins | | | | |
| MG151 reverse transcriptase | | 494 | MG151-56 reverse transcriptase | protein |
| proteins | | | | |
| MG151 reverse transcriptase | | 495 | MG151-57 reverse transcriptase | protein |
| proteins | | | | |
| MG151 reverse transcriptase | | 496 | MG151-58 reverse transcriptase | protein |
| proteins | | | | |
| MG151 reverse transcriptase | | 497 | MG151-59 reverse transcriptase | protein |
| proteins | | | | |
| MG151 reverse transcriptase | | 498 | MG151-60 reverse transcriptase | protein |
| proteins | | | | |
| MG151 reverse transcriptase | | 499 | MG151-61 reverse transcriptase | protein |
| proteins | | | | |
| MG151 reverse transcriptase | | 500 | MG151-62 reverse transcriptase | protein |
| proteins | | | | |
| MG151 reverse transcriptase | | 501 | MG151-63 reverse transcriptase | protein |
| proteins | | | | |
| MG151 reverse transcriptase | | 502 | MG151-64 reverse transcriptase | protein |
| proteins | | | | |
| MG151 reverse transcriptase | | 503 | MG151-65 reverse transcriptase | protein |
| proteins | | | | |
| MG151 reverse transcriptase | | 504 | MG151-66 reverse transcriptase | protein |
| proteins | | | | |
| MG151 reverse transcriptase | | 505 | MG151-67 reverse transcriptase | protein |
| proteins | | | | |
| MG151 reverse transcriptase | | 506 | MG151-68 reverse transcriptase | protein |
| proteins | | | | |
| MG151 reverse transcriptase | | 507 | MG151-69 reverse transcriptase | protein |
| proteins | | | | |
| MG151 reverse transcriptase | | 508 | MG151-70 reverse transcriptase | protein |
| proteins | | | | |
| MG151 reverse transcriptase | | 509 | MG151-71 reverse transcriptase | protein |
| proteins | | | | |
| MG151 reverse transcriptase | | 510 | MG151-72 reverse transcriptase | protein |
| proteins | | | | |
| MG151 reverse transcriptase | | 511 | MG151-73 reverse transcriptase | protein |
| proteins | | | | |
| MG151 reverse transcriptase | | 512 | MG151-74 reverse transcriptase | protein |
| proteins | | | | |
| MG151 reverse transcriptase | | 513 | MG151-75 reverse transcriptase | protein |
| proteins | | | | |
| MG151 reverse transcriptase | | 514 | MG151-76 reverse transcriptase | protein |
| proteins | | | | |
| MG151 reverse transcriptase | | 515 | MG151-77 reverse transcriptase | protein |
| proteins | | | | |
| MG151 reverse transcriptase | | 516 | MG151-78 reverse transcriptase | protein |
| proteins | | | | |
| MG151 reverse transcriptase | | 517 | MG151-79 reverse transcriptase | protein |
| proteins | | | | |
| MG151 reverse transcriptase | | 518 | MG151-80 reverse transcriptase | protein |
| proteins | | | | |
| MG151 reverse transcriptase | | 519 | MG151-81 reverse transcriptase | protein |
| proteins | | | | |
| MG151 reverse transcriptase | | 520 | MG151-82 reverse transcriptase | protein |
| proteins | | | | |
| MG151 reverse transcriptase | | 521 | MG151-83 reverse transcriptase | protein |
| proteins | | | | |
| MG151 reverse transcriptase | | 522 | MG151-84 reverse transcriptase | protein |
| proteins | | | | |
| MG151 reverse transcriptase | | 523 | MG151-85 reverse transcriptase | protein |
| proteins | | | | |
| MG151 reverse transcriptase | | 524 | MG151-87 reverse transcriptase | protein |
| proteins | | | | |
| MG151 reverse transcriptase | | 525 | MG151-88 reverse transcriptase | protein |
| proteins | | | | |
| MG151 reverse transcriptase | | 526 | MG151-89 reverse transcriptase | protein |
| proteins | | | | |
| MG151 reverse transcriptase | | 527 | MG151-90 reverse transcriptase | protein |
| proteins | | | | |
| MG151 reverse transcriptase | | 528 | MG151-91 reverse transcriptase | protein |
| proteins | | | | |
| MG151 reverse transcriptase | | 529 | MG151-92 reverse transcriptase | protein |
| proteins | | | | |
| MG151 reverse transcriptase | | 530 | MG151-93 reverse transcriptase | protein |
| proteins | | | | |
| MG151 reverse transcriptase | | 531 | MG151-94 reverse transcriptase | protein |
| proteins | | | | |
| MG151 reverse transcriptase | | 532 | MG151-95 reverse transcriptase | protein |
| proteins | | | | |
| MG151 reverse transcriptase | | 533 | MG151-96 reverse transcriptase | protein |
| proteins | | | | |
| MG151 reverse transcriptase | | 534 | MG151-97 reverse transcriptase | protein |
| proteins | | | | |
| MG151 reverse transcriptase | | 535 | MG151-98 reverse transcriptase | protein |
| proteins | | | | |
| MG151 reverse transcriptase | | 536 | MG151-99 reverse transcriptase | protein |
| proteins | | | | |
| MG151 reverse transcriptase | | 537 | MG151-100 reverse transcriptase | protein |
| proteins | | | | |
| MG151 reverse transcriptase | | 538 | MG151-101 reverse transcriptase | protein |
| proteins | | | | |
| MG151 reverse transcriptase | | 539 | MG151-102 reverse transcriptase | protein |
| proteins | | | | |
| MG151 reverse transcriptase | | 540 | MG151-103 reverse transcriptase | protein |
| proteins | | | | |
| MG151 reverse transcriptase | | 541 | MG151-104 reverse transcriptase | protein |
| proteins | | | | |
| MG151 reverse transcriptase | | 542 | MG151-105 reverse transcriptase | protein |
| proteins | | | | |
| MG151 reverse transcriptase | | 543 | MG151-106 reverse transcriptase | protein |
| proteins | | | | |
| MG151 reverse transcriptase | | 544 | MG151-107 reverse transcriptase | protein |
| proteins | | | | |
| MG151 reverse transcriptase | | 545 | MG151-108 reverse transcriptase | protein |
| proteins | | | | |
| MG151 reverse transcriptase | | 546 | MG151-109 reverse transcriptase | protein |
| proteins | | | | |
| MG151 reverse transcriptase | | 547 | MG151-110 reverse transcriptase | protein |
| proteins | | | | |
| MG151 reverse transcriptase | | 548 | MG151-111 reverse transcriptase | protein |
| proteins | | | | |
| MG151 reverse transcriptase | | 549 | MG151-112 reverse transcriptase | protein |
| proteins | | | | |
| MG151 reverse transcriptase | | 550 | MG151-113 reverse transcriptase | protein |
| proteins | | | | |
| MG151 reverse transcriptase | | 551 | MG151-114 reverse transcriptase | protein |
| proteins | | | | |
| MG151 reverse transcriptase | | 552 | MG151-115 reverse transcriptase | protein |
| proteins | | | | |
| MG151 reverse transcriptase | | 553 | MG151-116 reverse transcriptase | protein |
| proteins | | | | |
| MG151 reverse transcriptase | | 554 | MG151-117 reverse transcriptase | protein |
| proteins | | | | |
| MG153 reverse transcriptase | | 555 | MG153-1 reverse transcriptase | protein |
| proteins | | | | |
| MG153 reverse transcriptase | | 556 | MG153-2 reverse transcriptase | protein |
| proteins | | | | |
| MG153 reverse transcriptase | | 557 | MG153-3 reverse transcriptase | protein |
| proteins | | | | |
| MG153 reverse transcriptase | | 558 | MG153-4 reverse transcriptase | protein |
| proteins | | | | |
| MG153 reverse transcriptase | | 559 | MG153-5 reverse transcriptase | protein |
| proteins | | | | |
| MG153 reverse transcriptase | | 560 | MG153-6 reverse transcriptase | protein |
| proteins | | | | |
| MG153 reverse transcriptase | | 561 | MG153-7 reverse transcriptase | protein |
| proteins | | | | |
| MG153 reverse transcriptase | | 562 | MG153-8 reverse transcriptase | protein |
| proteins | | | | |
| MG153 reverse transcriptase | | 563 | MG153-9 reverse transcriptase | protein |
| proteins | | | | |
| MG153 reverse transcriptase | | 564 | MG153-10 reverse transcriptase | protein |
| proteins | | | | |
| MG153 reverse transcriptase | | 565 | MG153-11 reverse transcriptase | protein |
| proteins | | | | |
| MG153 reverse transcriptase | | 566 | MG153-12 reverse transcriptase | protein |
| proteins | | | | |
| MG153 reverse transcriptase | | 567 | MG153-13 reverse transcriptase | protein |
| proteins | | | | |
| MG153 reverse transcriptase | | 568 | MG153-14 reverse transcriptase | protein |
| proteins | | | | |
| MG153 reverse transcriptase | | 569 | MG153-15 reverse transcriptase | protein |
| proteins | | | | |
| MG153 reverse transcriptase | | 570 | MG153-16 reverse transcriptase | protein |
| proteins | | | | |
| MG153 reverse transcriptase | | 571 | MG153-17 reverse transcriptase | protein |
| proteins | | | | |
| MG153 reverse transcriptase | | 572 | MG153-18 reverse transcriptase | protein |
| proteins | | | | |
| MG153 reverse transcriptase | | 573 | MG153-19 reverse transcriptase | protein |
| proteins | | | | |
| MG153 reverse transcriptase | | 574 | MG153-20 reverse transcriptase | protein |
| proteins | | | | |
| MG153 reverse transcriptase | | 575 | MG153-21 reverse transcriptase | protein |
| proteins | | | | |
| MG153 reverse transcriptase | | 576 | MG153-25 reverse transcriptase | protein |
| proteins | | | | |
| MG153 reverse transcriptase | | 577 | MG153-26 reverse transcriptase | protein |
| proteins | | | | |
| MG153 reverse transcriptase | | 578 | MG153-27 reverse transcriptase | protein |
| proteins | | | | |
| MG153 reverse transcriptase | | 579 | MG153-28 reverse transcriptase | protein |
| proteins | | | | |
| MG153 reverse transcriptase | | 580 | MG153-29 reverse transcriptase | protein |
| proteins | | | | |
| MG153 reverse transcriptase | | 581 | MG153-30 reverse transcriptase | protein |
| proteins | | | | |
| MG153 reverse transcriptase | | 582 | MG153-31 reverse transcriptase | protein |
| proteins | | | | |
| MG153 reverse transcriptase | | 583 | MG153-32 reverse transcriptase | protein |
| proteins | | | | |
| MG153 reverse transcriptase | | 584 | MG153-33 reverse transcriptase | protein |
| proteins | | | | |
| MG153 reverse transcriptase | | 585 | MG153-34 reverse transcriptase | protein |
| proteins | | | | |
| MG153 reverse transcriptase | | 586 | MG153-35 reverse transcriptase | protein |
| proteins | | | | |
| MG153 reverse transcriptase | | 587 | MG153-36 reverse transcriptase | protein |
| proteins | | | | |
| MG153 reverse transcriptase | | 588 | MG153-37 reverse transcriptase | protein |
| proteins | | | | |
| MG153 reverse transcriptase | | 589 | MG153-38 reverse transcriptase | protein |
| proteins | | | | |
| MG153 reverse transcriptase | | 590 | MG153-39 reverse transcriptase | protein |
| proteins | | | | |
| MG153 reverse transcriptase | | 591 | MG153-40 reverse transcriptase | protein |
| proteins | | | | |
| MG153 reverse transcriptase | | 592 | MG153-41 reverse transcriptase | protein |
| proteins | | | | |
| MG153 reverse transcriptase | | 593 | MG153-42 reverse transcriptase | protein |
| proteins | | | | |
| MG153 reverse transcriptase | | 594 | MG153-43 reverse transcriptase | protein |
| proteins | | | | |
| MG153 reverse transcriptase | | 595 | MG153-44 reverse transcriptase | protein |
| proteins | | | | |
| MG153 reverse transcriptase | | 596 | MG153-45 reverse transcriptase | protein |
| proteins | | | | |
| MG153 reverse transcriptase | | 597 | MG153-46 reverse transcriptase | protein |
| proteins | | | | |
| MG153 reverse transcriptase | | 598 | MG153-47 reverse transcriptase | protein |
| proteins | | | | |
| MG153 reverse transcriptase | | 599 | MG153-48 reverse transcriptase | protein |
| proteins | | | | |
| MG153 reverse transcriptase | | 600 | MG153-49 reverse transcriptase | protein |
| proteins | | | | |
| MG153 reverse transcriptase | | 601 | MG153-50 reverse transcriptase | protein |
| proteins | | | | |
| MG153 reverse transcriptase | | 602 | MG153-51 reverse transcriptase | protein |
| proteins | | | | |
| MG153 reverse transcriptase | | 603 | MG153-52 reverse transcriptase | protein |
| proteins | | | | |
| MG153 reverse transcriptase | | 604 | MG153-53 reverse transcriptase | protein |
| proteins | | | | |
| MG153 reverse transcriptase | | 605 | MG153-54 reverse transcriptase | protein |
| proteins | | | | |
| MG153 reverse transcriptase | | 606 | MG153-55 reverse transcriptase | protein |
| proteins | | | | |
| MG153 reverse transcriptase | | 607 | MG153-56 reverse transcriptase | protein |
| proteins | | | | |
| MG153 reverse transcriptase | | 608 | MG153-57 reverse transcriptase | protein |
| proteins | | | | |
| MG154 reverse transcriptase | | 609 | MG154-1 reverse transcriptase | protein |
| proteins | | | | |
| MG154 reverse transcriptase | | 610 | MG154-2 reverse transcriptase | protein |
| proteins | | | | |
| MG155 reverse transcriptase | | 611 | MG155-1 reverse transcriptase | protein |
| proteins | | | | |
| MG155 reverse transcriptase | | 612 | MG155-2 reverse transcriptase | protein |
| proteins | | | | |
| MG155 reverse transcriptase | | 613 | MG155-3 reverse transcriptase | protein |
| proteins | | | | |
| MG155 reverse transcriptase | | 614 | MG155-4 reverse transcriptase | protein |
| proteins | | | | |
| MG155 reverse transcriptase | | 615 | MG155-5 reverse transcriptase | protein |
| proteins | | | | |
| MG156 reverse transcriptase | | 616 | MG156-1 reverse transcriptase | protein |
| proteins | | | | |
| MG156 reverse transcriptase | | 617 | MG156-2 reverse transcriptase | protein |
| proteins | | | | |
| MG157 reverse transcriptase | | 618 | MG157-1 reverse transcriptase | protein |
| proteins | | | | |
| MG157 reverse transcriptase | | 619 | MG157-2 reverse transcriptase | protein |
| proteins | | | | |
| MG157 reverse transcriptase | | 620 | MG157-3 reverse transcriptase | protein |
| proteins | | | | |
| MG157 reverse transcriptase | | 621 | MG157-4 reverse transcriptase | protein |
| proteins | | | | |
| MG157 reverse transcriptase | | 622 | MG157-5 reverse transcriptase | protein |
| proteins | | | | |
| MG158 reverse transcriptase | | 623 | MG158-1 reverse transcriptase | protein |
| proteins | | | | |
| MG159 reverse transcriptase | | 624 | MG159-1 reverse transcriptase | protein |
| proteins | | | | |
| MG159 reverse transcriptase | | 625 | MG159-2 reverse transcriptase | protein |
| proteins | | | | |
| MG159 reverse transcriptase | | 626 | MG159-3 reverse transcriptase | protein |
| proteins | | | | |
| MG160 reverse transcriptase | | 627 | MG160-1 reverse transcriptase | protein |
| proteins | | | | |
| MG160 reverse transcriptase | | 628 | MG160-2 reverse transcriptase | protein |
| proteins | | | | |
| MG160 reverse transcriptase | | 629 | MG160-3 reverse transcriptase | protein |
| proteins | | | | |
| MG160 reverse transcriptase | | 630 | MG160-4 reverse transcriptase | protein |
| proteins | | | | |
| MG160 reverse transcriptase | | 631 | MG160-5 reverse transcriptase | protein |
| proteins | | | | |
| MG160 reverse transcriptase | | 632 | MG160-8 reverse transcriptase | protein |
| proteins | | | | |
| MG160 reverse transcriptase | | 633 | MG160-6 reverse transcriptase | protein |
| proteins | | | | |
| MG160 reverse transcriptase | | 634 | MG160-9 reverse transcriptase | protein |
| proteins | | | | |
| MG160 reverse transcriptase | | 635 | MG160-10 reverse transcriptase | protein |
| proteins | | | | |
| MG160 reverse transcriptase | | 636 | MG160-11 reverse transcriptase | protein |
| proteins | | | | |
| MG160 reverse transcriptase | | 637 | MG160-12 reverse transcriptase | protein |
| proteins | | | | |
| MG160 reverse transcriptase | | 638 | MG160-13 reverse transcriptase | protein |
| proteins | | | | |
| MG160 reverse transcriptase | | 639 | MG160-14 reverse transcriptase | protein |
| proteins | | | | |
| MG160 reverse transcriptase | | 640 | MG160-15 reverse transcriptase | protein |
| proteins | | | | |
| MG160 reverse transcriptase | | 641 | MG160-16 reverse transcriptase | protein |
| proteins | | | | |
| MG160 reverse transcriptase | | 642 | MG160-17 reverse transcriptase | protein |
| proteins | | | | |
| MG160 reverse transcriptase | | 643 | MG160-18 reverse transcriptase | protein |
| proteins | | | | |
| MG160 reverse transcriptase | | 644 | MG160-19 reverse transcriptase | protein |
| proteins | | | | |
| MG160 reverse transcriptase | | 645 | MG160-20 reverse transcriptase | protein |
| proteins | | | | |
| MG160 reverse transcriptase | | 646 | MG160-21 reverse transcriptase | protein |
| proteins | | | | |
| MG160 reverse transcriptase | | 647 | MG160-22 reverse transcriptase | protein |
| proteins | | | | |
| MG160 reverse transcriptase | | 648 | MG160-23 reverse transcriptase | protein |
| proteins | | | | |
| MG160 reverse transcriptase | | 649 | MG160-24 reverse transcriptase | protein |
| proteins | | | | |
| MG160 reverse transcriptase | | 650 | MG160-25 reverse transcriptase | protein |
| proteins | | | | |
| MG160 reverse transcriptase | | 651 | MG160-26 reverse transcriptase | protein |
| proteins | | | | |
| MG160 reverse transcriptase | | 652 | MG160-27 reverse transcriptase | protein |
| proteins | | | | |
| MG160 reverse transcriptase | | 653 | MG160-28 reverse transcriptase | protein |
| proteins | | | | |
| MG160 reverse transcriptase | | 654 | MG160-29 reverse transcriptase | protein |
| proteins | | | | |
| MG160 reverse transcriptase | | 655 | MG160-30 reverse transcriptase | protein |
| proteins | | | | |
| MG160 reverse transcriptase | | 656 | MG160-31 reverse transcriptase | protein |
| proteins | | | | |
| MG160 reverse transcriptase | | 657 | MG160-32 reverse transcriptase | protein |
| proteins | | | | |
| MG160 reverse transcriptase | | 658 | MG160-33 reverse transcriptase | protein |
| proteins | | | | |
| MG160 reverse transcriptase | | 659 | MG160-34 reverse transcriptase | protein |
| proteins | | | | |
| MG160 reverse transcriptase | | 660 | MG160-35 reverse transcriptase | protein |
| proteins | | | | |
| MG160 reverse transcriptase | | 661 | MG160-36 reverse transcriptase | protein |
| proteins | | | | |
| MG160 reverse transcriptase | | 662 | MG160-37 reverse transcriptase | protein |
| proteins | | | | |
| MG160 reverse transcriptase | | 663 | MG160-38 reverse transcriptase | protein |
| proteins | | | | |
| MG160 reverse transcriptase | | 664 | MG160-39 reverse transcriptase | protein |
| proteins | | | | |
| MG160 reverse transcriptase | | 665 | MG160-40 reverse transcriptase | protein |
| proteins | | | | |
| MG160 reverse transcriptase | | 666 | MG160-41 reverse transcriptase | protein |
| proteins | | | | |
| MG160 reverse transcriptase | | 667 | MG160-42 reverse transcriptase | protein |
| proteins | | | | |
| MG160 reverse transcriptase | | 668 | MG160-43 reverse transcriptase | protein |
| proteins | | | | |
| MG160 reverse transcriptase | | 669 | MG160-44 reverse transcriptase | protein |
| proteins | | | | |
| MG160 reverse transcriptase | | 670 | MG160-45 reverse transcriptase | protein |
| proteins | | | | |
| MG160 reverse transcriptase | | 671 | MG160-46 reverse transcriptase | protein |
| proteins | | | | |
| MG160 reverse transcriptase | | 672 | MG160-47 reverse transcriptase | protein |
| proteins | | | | |
| MG160 reverse transcriptase | | 673 | MG160-48 reverse transcriptase | protein |
| proteins | | | | |
| MG163 reverse transcriptase | | 674 | MG163-1 reverse transcriptase | protein |
| proteins | | | | |
| MG163 reverse transcriptase | | 675 | MG163-2 reverse transcriptase | protein |
| proteins | | | | |
| MG163 reverse transcriptase | | 676 | MG163-3 reverse transcriptase | protein |
| proteins | | | | |
| MG163 reverse transcriptase | | 677 | MG163-4 reverse transcriptase | protein |
| proteins | | | | |
| MG163 reverse transcriptase | | 678 | MG163-5 reverse transcriptase | protein |
| proteins | | | | |
| MG164 reverse transcriptase | | 679 | MG164-1 reverse transcriptase | protein |
| proteins | | | | |
| MG164 reverse transcriptase | | 680 | MG164-2 reverse transcriptase | protein |
| proteins | | | | |
| MG164 reverse transcriptase | | 681 | MG164-3 reverse transcriptase | protein |
| proteins | | | | |
| MG164 reverse transcriptase | | 682 | MG164-4 reverse transcriptase | protein |
| proteins | | | | |
| MG164 reverse transcriptase | | 683 | MG164-5 reverse transcriptase | protein |
| proteins | | | | |
| MG165 reverse transcriptase | | 684 | MG165-1 reverse transcriptase | protein |
| proteins | | | | |
| MG165 reverse transcriptase | | 685 | MG165-2 reverse transcriptase | protein |
| proteins | | | | |
| MG165 reverse transcriptase | | 686 | MG165-3 reverse transcriptase | protein |
| proteins | | | | |
| MG165 reverse transcriptase | | 687 | MG165-4 reverse transcriptase | protein |
| proteins | | | | |
| MG165 reverse transcriptase | | 688 | MG165-5 reverse transcriptase | protein |
| proteins | | | | |
| MG165 reverse transcriptase | | 689 | MG165-6 reverse transcriptase | protein |
| proteins | | | | |
| MG165 reverse transcriptase | | 690 | MG165-7 reverse transcriptase | protein |
| proteins | | | | |
| MG165 reverse transcriptase | | 691 | MG165-8 reverse transcriptase | protein |
| proteins | | | | |
| MG165 reverse transcriptase | | 692 | MG165-9 reverse transcriptase | protein |
| proteins | | | | |
| MG166 reverse transcriptase | | 693 | MG166-1 reverse transcriptase | protein |
| proteins | | | | |
| MG166 reverse transcriptase | | 694 | MG166-2 reverse transcriptase | protein |
| proteins | | | | |
| MG166 reverse transcriptase | | 695 | MG166-3 reverse transcriptase | protein |
| proteins | | | | |
| MG166 reverse transcriptase | | 696 | MG166-4 reverse transcriptase | protein |
| proteins | | | | |
| MG166 reverse transcriptase | | 697 | MG166-5 reverse transcriptase | protein |
| proteins | | | | |
| MG167 reverse transcriptase | | 698 | MG167-1 reverse transcriptase | protein |
| proteins | | | | |
| MG167 reverse transcriptase | | 699 | MG167-2 reverse transcriptase | protein |
| proteins | | | | |
| MG167 reverse transcriptase | | 700 | MG167-3 reverse transcriptase | protein |
| proteins | | | | |
| MG167 reverse transcriptase | | 701 | MG167-4 reverse transcriptase | protein |
| proteins | | | | |
| MG167 reverse transcriptase | | 702 | MG167-5 reverse transcriptase | protein |
| proteins | | | | |
| MG168 reverse transcriptase | | 703 | MG168-1 reverse transcriptase | protein |
| proteins | | | | |
| MG168 reverse transcriptase | | 704 | MG168-2 reverse transcriptase | protein |
| proteins | | | | |
| MG168 reverse transcriptase | | 705 | MG168-3 reverse transcriptase | protein |
| proteins | | | | |
| MG168 reverse transcriptase | | 706 | MG168-4 reverse transcriptase | protein |
| proteins | | | | |
| MG168 reverse transcriptase | | 707 | MG168-5 reverse transcriptase | protein |
| proteins | | | | |
| MG169 reverse transcriptase | | 708 | MG169-1 reverse transcriptase | protein |
| proteins | | | | |
| MG169 reverse transcriptase | | 709 | MG169-2 reverse transcriptase | protein |
| proteins | | | | |
| MG169 reverse transcriptase | | 710 | MG169-3 reverse transcriptase | protein |
| proteins | | | | |
| MG169 reverse transcriptase | | 711 | MG169-4 reverse transcriptase | protein |
| proteins | | | | |
| MG169 reverse transcriptase | | 712 | MG169-5 reverse transcriptase | protein |
| proteins | | | | |
| MG169 reverse transcriptase | | 713 | MG169-6 reverse transcriptase | protein |
| proteins | | | | |
| MG169 reverse transcriptase | | 714 | MG169-7 reverse transcriptase | protein |
| proteins | | | | |
| MG169 reverse transcriptase | | 715 | MG169-8 reverse transcriptase | protein |
| proteins | | | | |
| MG169 reverse transcriptase | | 716 | MG169-9 reverse transcriptase | protein |
| proteins | | | | |
| MG169 reverse transcriptase | | 717 | MG169-10 reverse transcriptase | protein |
| proteins | | | | |
| MG169 reverse transcriptase | | 718 | MG169-11 reverse transcriptase | protein |
| proteins | | | | |
| MG170 reverse transcriptase | | 719 | MG170-1 reverse transcriptase | protein |
| proteins | | | | |
| MG170 reverse transcriptase | | 720 | MG170-2 reverse transcriptase | protein |
| proteins | | | | |
| MG170 reverse transcriptase | | 721 | MG170-3 reverse transcriptase | protein |
| proteins | | | | |
| MG170 reverse transcriptase | | 722 | MG170-4 reverse transcriptase | protein |
| proteins | | | | |
| MG170 reverse transcriptase | | 723 | MG170-5 reverse transcriptase | protein |
| proteins | | | | |
| MG170 reverse transcriptase | | 724 | MG170-6 reverse transcriptase | protein |
| proteins | | | | |
| MG170 reverse transcriptase | | 725 | MG170-7 reverse transcriptase | protein |
| proteins | | | | |
| MG170 reverse transcriptase | | 726 | MG170-8 reverse transcriptase | protein |
| proteins | | | | |
| MG170 reverse transcriptase | | 727 | MG170-9 reverse transcriptase | protein |
| proteins | | | | |
| MG170 reverse transcriptase | | 728 | MG170-10 reverse transcriptase | protein |
| proteins | | | | |
| MG172 reverse transcriptase | | 729 | MG172-1 reverse transcriptase | protein |
| proteins | | | | |
| MG172 reverse transcriptase | | 730 | MG172-2 reverse transcriptase | protein |
| proteins | | | | |
| MG172 reverse transcriptase | | 731 | MG172-3 reverse transcriptase | protein |
| proteins | | | | |
| MG172 reverse transcriptase | | 732 | MG172-4 reverse transcriptase | protein |
| proteins | | | | |
| MG172 reverse transcriptase | | 733 | MG172-5 reverse transcriptase | protein |
| proteins | | | | |
| MG173 reverse transcriptase | | 734 | MG173-1 reverse transcriptase | protein |
| proteins | | | | |
| MG173 reverse transcriptase | | 735 | MG173-2 reverse transcriptase | protein |
| proteins | | | | |
| PS modified primers | | 736 | PS-modified DNA primer #1, PS bond | nucleotide |
| | | | denoted by * | |
| PS modified primers | | 737 | PS-modified DNA primer #2, PS bond | nucleotide |
| | | | denoted by * | |
| PS modified primers | | 738 | PS-modified DNA primer #3, PS bond | nucleotide |
| | | | denoted by * | |
| Tagman probe for qPCR | | 739 | Tagman probe for 542 bp amplicon | nucleotide |
| MG153 RT MCP fusions | | 740 | FH-MCP-MG153-5 | nucleotide |
| MG153 RT MCP fusions | | 741 | FH-MCP-MG153-6 | nucleotide |
| MG153 RT MCP fusions | | 742 | FH-MCP-MG153-18 | nucleotide |
| MG153 RT MCP fusions | | 743 | FH-MCP-MG153-20 | nucleotide |
| MG153 RT MCP fusions | | 744 | FH-MCP-MG153-29 | nucleotide |
| MG153 RT MCP fusions | | 745 | FH-MCP-MG153-30 | nucleotide |
| MG153 RT MCP fusions | | 746 | FH-MCP-MG153-31 | nucleotide |
| MG153 RT MCP fusions | | 747 | FH-MCP-MG153-33 | nucleotide |
| MG153 RT MCP fusions | | 748 | FH-MCP-MG153-34 | nucleotide |
| MG153 RT MCP fusions | | 749 | FH-MCP-MG153-35 | nucleotide |
| MG153 RT MCP fusions | | 750 | FH-MCP-MG153-36 | nucleotide |
| MG153 RT MCP fusions | | 751 | FH-MCP-MG153-37 | nucleotide |
| MG153 RT MCP fusions | | 752 | FH-MCP-MG153-45 | nucleotide |
| MG153 RT MCP fusions | | 753 | FH-MCP-MG153-51 | nucleotide |
| MG153 RT MCP fusions | | 754 | FH-MCP-MG153-53 | nucleotide |
| MG153 RT MCP fusions | | 755 | FH-MCP-MG153-54 | nucleotide |
| MG153 RT MCP fusions | | 756 | FH-MCP-MG153-57 | nucleotide |
| MG165 RT MCP fusions | | 757 | FH-MCP-MG165-1 | nucleotide |
| MG165 RT MCP fusions | | 758 | FH-MCP-MG165-5 | nucleotide |
| MG167 RT MCP fusions | | 759 | FH-MCP-MG167-1 | nucleotide |
| MG167 RT MCP fusions | | 760 | FH-MCP-MG167-4 | nucleotide |
| MG140 UTR | | 761 | MG140-54 5′ UTR | nucleotide |
| MG140 UTR | | 762 | MG140-54 3′ UTR | nucleotide |
| MG140 UTR | | 763 | MG140-55 5′ UTR | nucleotide |
| MG140 UTR | | 764 | MG140-55 3′ UTR | nucleotide |
| MG140 UTR | | 765 | MG140-56 5′ UTR | nucleotide |
| MG140 UTR | | 766 | MG140-56 3′ UTR | nucleotide |
| MG140 UTR | | 767 | MG140-1 5′ UTR | nucleotide |
| MG140 UTR | | 768 | MG140-1 3′ UTR | nucleotide |
| MG140 UTR | | 769 | MG140-3 5′ UTR | nucleotide |
| MG140 UTR | | 770 | MG140-3 3′ UTR | nucleotide |
| MG140 UTR | | 771 | MG140-4 5′ UTR | nucleotide |
| MG140 UTR | | 772 | MG140-4 3′ UTR | nucleotide |
| MG140 UTR | | 773 | MG140-5 5′ UTR | nucleotide |
| MG140 UTR | | 774 | MG140-5 3′ UTR | nucleotide |
| MG140 UTR | | 775 | MG140-6 5′ UTR | nucleotide |
| MG140 UTR | | 776 | MG140-6 3′ UTR | nucleotide |
| MG140 UTR | | 777 | MG140-7 5′ UTR | nucleotide |
| MG140 UTR | | 778 | MG140-7 3′ UTR | nucleotide |
| MG140 UTR | | 779 | MG140-8 5′ UTR | nucleotide |
| MG140 UTR | | 780 | MG140-8 3′ UTR | nucleotide |
| MG140 UTR | | 781 | MG140-10 5′ UTR | nucleotide |
| MG140 UTR | | 782 | MG140-10 3′ UTR | nucleotide |
| MG140 UTR | | 783 | MG140-13 5′ UTR | nucleotide |
| MG140 UTR | | 784 | MG140-13 3′ UTR | nucleotide |
| MG140 UTR | | 785 | MG140-14 5′ UTR | nucleotide |
| MG140 UTR | | 786 | MG140-14 3′ UTR | nucleotide |
| MG140 UTR | | 787 | MG140-45 5′ UTR | nucleotide |
| MG140 UTR | | 788 | MG140-45 3′ UTR | nucleotide |
| MG140 UTR | | 789 | MG140-46 5′ UTR | nucleotide |
| MG140 UTR | | 790 | MG140-46 3′ UTR | nucleotide |
| MG140 UTR | | 791 | MG140-47 5′ UTR | nucleotide |
| MG140 UTR | | 792 | MG140-47 3′ UTR | nucleotide |
| MG140 UTR | | 793 | MG140-54 5′ UTR | nucleotide |
| MG140 UTR | | 794 | MG140-54 3′ UTR | nucleotide |
| MG140 UTR | | 795 | MG140-55 5′ UTR | nucleotide |
| MG140 UTR | | 796 | MG140-55 3′ UTR | nucleotide |
| MG140 UTR | | 797 | MG140-56 5′ UTR | nucleotide |
| MG140 UTR | | 798 | MG140-56 3′ UTR | nucleotide |
| MG140 reverse transcriptase | | 799 | MG140-54 reverse transcriptase | protein |
| proteins | | | | |
| MG140 reverse transcriptase | | 800 | MG140-55 reverse transcriptase | protein |
| proteins | | | | |
| MG140 reverse transcriptase | | 801 | MG140-56 reverse transcriptase | protein |
| proteins | | | | |
| MG140 reverse transcriptase | | 802 | MG140-54 reverse transcriptase | protein |
| proteins | | | | |
| MG140 reverse transcriptase | | 803 | MG140-55 reverse transcriptase | protein |
| proteins | | | | |
| MG140 reverse transcriptase | | 804 | MG140-56 reverse transcriptase | protein |
| proteins | | | | |
| MG140 reverse transcriptase | | 805 | MG140-57 reverse transcriptase | protein |
| proteins | | | | |
| MG140 reverse transcriptase | | 806 | MG140-58 reverse transcriptase | protein |
| proteins | | | | |
| MG140 reverse transcriptase | | 807 | MG140-59 reverse transcriptase | protein |
| proteins | | | | |
| MG140 reverse transcriptase | | 808 | MG140-60 reverse transcriptase | protein |
| proteins | | | | |
| MG140 reverse transcriptase | | 809 | MG140-61 reverse transcriptase | protein |
| proteins | | | | |
| MG140 reverse transcriptase | | 810 | MG140-62 reverse transcriptase | protein |
| proteins | | | | |
| MG140 reverse transcriptase | | 811 | MG140-63 reverse transcriptase | protein |
| proteins | | | | |
| MG140 reverse transcriptase | | 812 | MG140-64 reverse transcriptase | protein |
| proteins | | | | |
| MG140 reverse transcriptase | | 813 | MG140-65 reverse transcriptase | protein |
| proteins | | | | |
| MG140 reverse transcriptase | | 814 | MG140-66 reverse transcriptase | protein |
| proteins | | | | |
| MG140 reverse transcriptase | | 815 | MG140-67 reverse transcriptase | protein |
| proteins | | | | |
| MG140 reverse transcriptase | | 816 | MG140-68 reverse transcriptase | protein |
| proteins | | | | |
| MG140 reverse transcriptase | | 817 | MG140-69 reverse transcriptase | protein |
| proteins | | | | |
| MG140 reverse transcriptase | | 818 | MG140-70 reverse transcriptase | protein |
| proteins | | | | |
| MG140 reverse transcriptase | | 819 | MG140-71 reverse transcriptase | protein |
| proteins | | | | |
| MG140 reverse transcriptase | | 820 | MG140-72 reverse transcriptase | protein |
| proteins | | | | |
| MG140 reverse transcriptase | | 821 | MG140-73 reverse transcriptase | protein |
| proteins | | | | |
| MG140 reverse transcriptase | | 822 | MG140-74 reverse transcriptase | protein |
| proteins | | | | |
| MG140 reverse transcriptase | | 823 | MG140-75 reverse transcriptase | protein |
| proteins | | | | |
| MG140 reverse transcriptase | | 824 | MG140-76 reverse transcriptase | protein |
| proteins | | | | |
| MG140 reverse transcriptase | | 825 | MG140-77 reverse transcriptase | protein |
| proteins | | | | |
| MG140 reverse transcriptase | | 826 | MG140-78 reverse transcriptase | protein |
| proteins | | | | |
| MG140 reverse transcriptase | | 827 | MG140-79 reverse transcriptase | protein |
| proteins | | | | |
| MG140 reverse transcriptase | | 828 | MG140-80 reverse transcriptase | protein |
| proteins | | | | |
| MG140 reverse transcriptase | | 829 | MG140-81 reverse transcriptase | protein |
| proteins | | | | |
| MG140 reverse transcriptase | | 830 | MG140-82 reverse transcriptase | protein |
| proteins | | | | |
| MG140 reverse transcriptase | | 831 | MG140-83 reverse transcriptase | protein |
| proteins | | | | |
| MG140 reverse transcriptase | | 832 | MG140-84 reverse transcriptase | protein |
| proteins | | | | |
| MG140 reverse transcriptase | | 833 | MG140-85 reverse transcriptase | protein |
| proteins | | | | |
| MG140 reverse transcriptase | | 834 | MG140-86 reverse transcriptase | protein |
| proteins | | | | |
| MG140 reverse transcriptase | | 835 | MG140-87 reverse transcriptase | protein |
| proteins | | | | |
| MG140 reverse transcriptase | | 836 | MG140-88 reverse transcriptase | protein |
| proteins | | | | |
| MG140 reverse transcriptase | | 837 | MG140-89 reverse transcriptase | protein |
| proteins | | | | |
| MG140 reverse transcriptase | | 838 | MG140-90 reverse transcriptase | protein |
| proteins | | | | |
| MG140 reverse transcriptase | | 839 | MG140-91 reverse transcriptase | protein |
| proteins | | | | |
| MG140 reverse transcriptase | | 840 | MG140-92 reverse transcriptase | protein |
| proteins | | | | |
| MG140 reverse transcriptase | | 841 | MG140-93 reverse transcriptase | protein |
| proteins | | | | |
| MG140 reverse transcriptase | | 842 | MG140-94 reverse transcriptase | protein |
| proteins | | | | |
| MG140 reverse transcriptase | | 843 | MG140-95 reverse transcriptase | protein |
| proteins | | | | |
| MG140 reverse transcriptase | | 844 | MG140-96 reverse transcriptase | protein |
| proteins | | | | |
| MG140 reverse transcriptase | | 845 | MG140-97 reverse transcriptase | protein |
| proteins | | | | |
| MG140 reverse transcriptase | | 846 | MG140-98 reverse transcriptase | protein |
| proteins | | | | |
| MG140 reverse transcriptase | | 847 | MG140-99 reverse transcriptase | protein |
| proteins | | | | |
| MG140 reverse transcriptase | | 848 | MG140-100 reverse transcriptase | protein |
| proteins | | | | |
| MG140 reverse transcriptase | | 849 | MG140-101 reverse transcriptase | protein |
| proteins | | | | |
| MG140 reverse transcriptase | | 850 | MG140-102 reverse transcriptase | protein |
| proteins | | | | |
| MG140 reverse transcriptase | | 851 | MG140-103 reverse transcriptase | protein |
| proteins | | | | |
| MG140 reverse transcriptase | | 852 | MG140-104 reverse transcriptase | protein |
| proteins | | | | |
| MG140 reverse transcriptase | | 853 | MG140-105 reverse transcriptase | protein |
| proteins | | | | |
| MG140 reverse transcriptase | | 854 | MG140-106 reverse transcriptase | protein |
| proteins | | | | |
| MG140 reverse transcriptase | | 855 | MG140-107 reverse transcriptase | protein |
| proteins | | | | |
| MG140 reverse transcriptase | | 856 | MG140-108 reverse transcriptase | protein |
| proteins | | | | |
| MG140 reverse transcriptase | | 857 | MG140-109 reverse transcriptase | protein |
| proteins | | | | |
| MG140 reverse transcriptase | | 858 | MG140-110 reverse transcriptase | protein |
| proteins | | | | |
| MG140 reverse transcriptase | | 859 | MG140-111 reverse transcriptase | protein |
| proteins | | | | |
| MG140 reverse transcriptase | | 860 | MG140-112 reverse transcriptase | protein |
| proteins | | | | |
| MG140 reverse transcriptase | | 861 | MG140-113 reverse transcriptase | protein |
| proteins | | | | |
| MG140 reverse transcriptase | | 862 | MG140-114 reverse transcriptase | protein |
| proteins | | | | |
| MG140 reverse transcriptase | | 863 | MG140-115 reverse transcriptase | protein |
| proteins | | | | |
| MG140 reverse transcriptase | | 864 | MG140-116 reverse transcriptase | protein |
| proteins | | | | |
| MG140 reverse transcriptase | | 865 | MG140-117 reverse transcriptase | protein |
| proteins | | | | |
| MG140 reverse transcriptase | | 866 | MG140-118 reverse transcriptase | protein |
| proteins | | | | |
| MG140 reverse transcriptase | | 867 | MG140-119 reverse transcriptase | protein |
| proteins | | | | |
| MG140 reverse transcriptase | | 868 | MG140-120 reverse transcriptase | protein |
| proteins | | | | |
| MG140 reverse transcriptase | | 869 | MG140-121 reverse transcriptase | protein |
| proteins | | | | |
| MG140 reverse transcriptase | | 870 | MG140-122 reverse transcriptase | protein |
| proteins | | | | |
| MG140 reverse transcriptase | | 871 | MG140-123 reverse transcriptase | protein |
| proteins | | | | |
| MG140 reverse transcriptase | | 872 | MG140-124 reverse transcriptase | protein |
| proteins | | | | |
| MG140 reverse transcriptase | | 873 | MG140-125 reverse transcriptase | protein |
| proteins | | | | |
| MG140 reverse transcriptase | | 874 | MG140-126 reverse transcriptase | protein |
| proteins | | | | |
| MG140 reverse transcriptase | | 875 | MG140-127 reverse transcriptase | protein |
| proteins | | | | |
| MG140 reverse transcriptase | | 876 | MG140-128 reverse transcriptase | protein |
| proteins | | | | |
| MG140 reverse transcriptase | | 877 | MG140-129 reverse transcriptase | protein |
| proteins | | | | |
| MG140 reverse transcriptase | | 878 | MG140-130 reverse transcriptase | protein |
| proteins | | | | |
| MG140 reverse transcriptase | | 879 | MG140-131 reverse transcriptase | protein |
| proteins | | | | |
| MG140 reverse transcriptase | | 880 | MG140-132 reverse transcriptase | protein |
| proteins | | | | |
| MG140 reverse transcriptase | | 881 | MG140-133 reverse transcriptase | protein |
| proteins | | | | |
| MG140 reverse transcriptase | | 882 | MG140-134 reverse transcriptase | protein |
| proteins | | | | |
| MG140 reverse transcriptase | | 883 | MG140-135 reverse transcriptase | protein |
| proteins | | | | |
| MG140 reverse transcriptase | | 884 | MG140-136 reverse transcriptase | protein |
| proteins | | | | |
| MG140 reverse transcriptase | | 885 | MG140-137 reverse transcriptase | protein |
| proteins | | | | |
| MG140 reverse transcriptase | | 886 | MG140-138 reverse transcriptase | protein |
| proteins | | | | |
| MG140 reverse transcriptase | | 887 | MG140-139 reverse transcriptase | protein |
| proteins | | | | |
| MG140 reverse transcriptase | | 888 | MG140-140 reverse transcriptase | protein |
| proteins | | | | |
| MG140 reverse transcriptase | | 889 | MG140-141 reverse transcriptase | protein |
| proteins | | | | |
| MG140 reverse transcriptase | | 890 | MG140-142 reverse transcriptase | protein |
| proteins | | | | |
| MG140 reverse transcriptase | | 891 | MG140-143 reverse transcriptase | protein |
| proteins | | | | |
| MG140 reverse transcriptase | | 892 | MG140-144 reverse transcriptase | protein |
| proteins | | | | |
| MG140 reverse transcriptase | | 893 | MG140-145 reverse transcriptase | protein |
| proteins | | | | |
| MG140 reverse transcriptase | | 894 | MG140-146 reverse transcriptase | protein |
| proteins | | | | |
| MG146 transposition proteins | | 895 | MG146-2 transposition protein | protein |

### EMBODIMENTS

[0347] The following embodiments are not intended to be limiting in any way.
[0348] Embodiment 1. An engineered retrotransposase system, comprising:
   [0349] (a) an RNA comprising a heterologous engineered cargo nucleotide sequence, wherein said cargo nucleotide sequence is configured to interact with a retrotransposase; and
   [0350] (b) a retrotransposase, wherein:
[0351] said retrotransposase is configured to transpose said cargo nucleotide sequence to a target nucleic acid locus; and said retrotransposase is derived from an uncultivated microorganism.
[0352] Embodiment 2. The engineered retrotransposase system of embodiment Embodiment 1, wherein said retrotransposase comprises a sequence having at least 75% sequence identity to any one of SEQ ID NOs: 1-29, 393-735, or 799-895.
[0353] Embodiment 3. The engineered retrotransposase system of embodiment Embodiment 1 or embodiment Embodiment 2, wherein said retrotransposase comprises a reverse transcriptase domain.
[0354] Embodiment 4. The engineered retrotransposase system of any one of embodiments Embodiment 1 to Embodiment 3, wherein said retrotransposase further comprises one or more zinc finger domains.
[0355] Embodiment 5. The engineered retrotransposase system of any one of embodiments Embodiment 1 to Embodiment 4, wherein said retrotransposase further comprises an endonuclease domain.
[0356] Embodiment 6. The engineered retrotransposase system of any one of embodiments Embodiment 1 to Embodiment 5, wherein said retrotransposase has less than 80% sequence identity to a documented retrotransposase.
[0357] Embodiment 7. The engineered retrotransposase system of any one of embodiments Embodiment 1 to Embodiment 6, wherein said cargo nucleotide sequence is flanked by a 3′ untranslated region (UTR) and a 5′ untranslated region (UTR).
[0358] Embodiment 8. The engineered retrotransposase system of any one of embodiments Embodiment 1 to Embodiment 7, wherein said retrotransposase is configured to transpose said cargo nucleotide sequence via a ribonucleic acid polynucleotide intermediate.
[0359] Embodiment 9. The engineered retrotransposase system of any one of embodiments Embodiment 1 to Embodiment 8, wherein said retrotransposase comprises one or more nuclear localization sequences (NLSs) proximal to an N- or C-terminus of said retrotransposase.
[0360] Embodiment 10. The engineered retrotransposase system of any one of embodiments Embodiment 1 to Embodiment 9, wherein said NLS comprises a sequence at least 80% identical to a sequence selected from the group consisting of SEQ ID NO: 896-911.
[0361] Embodiment 11. The engineered retrotransposase system of any one of embodiments Embodiment 1 to Embodiment 10, wherein said sequence identity is determined by a BLASTP, CLUSTALW, MUSCLE, MAFFT, or CLUSTALW with the parameters of the Smith-Waterman homology search algorithm.
[0362] Embodiment 12. The engineered retrotransposase system of embodiment Embodiment 11, wherein said sequence identity is determined by said BLASTP homology search algorithm using parameters of a wordlength (W) of 3, an expectation (E) of 10, and a BLOSUM62 scoring matrix setting gap costs at existence of 11, extension of 1, and using a conditional compositional score matrix adjustment.
[0363] Embodiment 13. An engineered retrotransposase system, comprising:
   [0364] (a) an RNA comprising a heterologous engineered cargo nucleotide sequence, wherein said cargo nucleotide sequence is configured to interact with a retrotransposase; and
   [0365] (b) a retrotransposase, wherein:
[0366] said retrotransposase is configured to transpose said cargo nucleotide sequence to a target nucleic acid locus; and said retrotransposase comprises a sequence having at least 75% sequence identity to any one of SEQ ID NOs: 1-29, 393-735, or 799-895.
[0367] Embodiment 14. The engineered retrotransposase system of embodiment Embodiment 13, wherein said retrotransposase is derived from an uncultivated microorganism.
[0368] Embodiment 15. The engineered retrotransposase system of embodiment Embodiment 13 or embodiment Embodiment 14, wherein said retrotransposase comprises a reverse transcriptase domain.
[0369] Embodiment 16. The engineered retrotransposase system of any one of embodiments Embodiment 13 to Embodiment 15, wherein said retrotransposase further comprises one or more zinc finger domains.
[0370] Embodiment 17. The engineered retrotransposase system of any one of embodiments Embodiment 13 to Embodiment 16, wherein said retrotransposase further comprises an endonuclease domain.
[0371] Embodiment 18. The engineered retrotransposase system of any one of embodiments Embodiment 13 to Embodiment 17, wherein said retrotransposase has less than 80% sequence identity to a documented retrotransposase.
[0372] Embodiment 19. The engineered retrotransposase system of any one of embodiments Embodiment 13 to Embodiment 18, wherein said cargo nucleotide sequence is flanked by a 3′ untranslated region (UTR) and a 5′ untranslated region (UTR).
[0373] Embodiment 20. The engineered retrotransposase system of any one of embodiments Embodiment 13 to Embodiment 19, wherein said retrotransposase is configured to transpose said cargo nucleotide sequence via a ribonucleic acid polynucleotide intermediate.
[0374] Embodiment 21. The engineered retrotransposase system of any one of embodiments Embodiment 13 to Embodiment 20, wherein said sequence identity is determined by a BLASTP, CLUSTALW, MUSCLE, MAFFT, or CLUSTALW with the parameters of the Smith-Waterman homology search algorithm.
[0375] Embodiment 22. The engineered retrotransposase system of embodiment Embodiment 21, wherein said sequence identity is determined by said BLASTP homology search algorithm using parameters of a wordlength (W) of 3, an expectation (E) of 10, and a BLOSUM62 scoring matrix setting gap costs at existence of 11, extension of 1, and using a conditional compositional score matrix adjustment.
[0376] Embodiment 23. A deoxyribonucleic acid polynucleotide encoding said engineered retrotransposase system of any one of embodiments Embodiment 1 to Embodiment 22.
[0377] Embodiment 24. A nucleic acid comprising an engineered nucleic acid sequence optimized for expression in an organism, wherein said nucleic acid encodes a retrotransposase, and wherein said retrotransposase is derived from an uncultivated microorganism, wherein said organism is not said uncultivated microorganism.
[0378] Embodiment 25. The nucleic acid of embodiment Embodiment 24, wherein said retrotransposase comprises a variant having at least 75% sequence identity to any one of SEQ ID NOs: 1-29, 393-735, or 799-895.
[0379] Embodiment 26. The nucleic acid of embodiment Embodiment 24 or embodiment Embodiment 25, wherein said retrotransposase comprises a sequence encoding one or more nuclear localization sequences (NLSs) proximal to an N- or C-terminus of said retrotransposase.
[0380] Embodiment 27. The nucleic acid of embodiment Embodiment 26, wherein said NLS comprises a sequence selected from SEQ ID NOs: 896-911.
[0381] Embodiment 28. The nucleic acid of embodiment Embodiment 26 or Embodiment 27, wherein said NLS comprises SEQ ID NO: 897.
[0382] Embodiment 29. The nucleic acid of embodiment Embodiment 28, wherein said NLS is proximal to said N-terminus of said retrotransposase.
[0383] Embodiment 30. The nucleic acid of embodiment Embodiment 26 or Embodiment 27, wherein said NLS comprises SEQ ID NO: 896.
[0384] Embodiment 31. The nucleic acid of embodiment Embodiment 30, wherein said NLS is proximal to said C-terminus of said retrotransposase.
[0385] Embodiment 32. The nucleic acid of any one of embodiments Embodiment 24 to Embodiment 31, wherein said organism is prokaryotic, bacterial, eukaryotic, fungal, plant, mammalian, rodent, or human.
[0386] Embodiment 33. A vector comprising said nucleic acid of any one of embodiments Embodiment 24 to Embodiment 32.
[0387] Embodiment 34. The vector of embodiment Embodiment 33, further comprising a nucleic acid encoding a cargo nucleotide sequence configured to form a complex with said retrotransposase.
[0388] Embodiment 35. The vector of embodiment Embodiment 33 or embodiment Embodiment 34, wherein said vector is a plasmid, a minicircle, a CELiD, an adeno-associated virus (AAV) derived virion, or a lentivirus.
[0389] Embodiment 36. A cell comprising said vector of any one of any one of embodiments Embodiment 33 to Embodiment 35.
[0390] Embodiment 37. A method of manufacturing a retrotransposase, comprising cultivating said cell of embodiment Embodiment 36.
[0391] Embodiment 38. A method for disrupting, binding, nicking, cleaving, marking, or modifying a double-stranded deoxyribonucleic acid polynucleotide comprising a target nucleic acid locus, comprising:
   [0392] (a) contacting said double-stranded deoxyribonucleic acid polynucleotide comprising said target nucleic acid locus with a retrotransposase configured to transpose a cargo nucleotide sequence to said target nucleic acid locus; and
   [0393] (b) wherein said retrotransposase comprises a sequence having at least 75% sequence identity to any one of SEQ ID NOs: 1-29, 393-735, or 799-895.
[0394] Embodiment 39. The method of embodiment Embodiment 38, wherein said retrotransposase is derived from an uncultivated microorganism.
[0395] Embodiment 40. The engineered retrotransposase system of embodiment Embodiment 38 or embodiment Embodiment 39, wherein said retrotransposase comprises a reverse transcriptase domain.
[0396] Embodiment 41. The engineered retrotransposase system of any one of embodiments Embodiment 38 to Embodiment 40, wherein said retrotransposase further comprises one or more zinc finger domains.
[0397] Embodiment 42. The engineered retrotransposase system of any one of embodiments Embodiment 38 to Embodiment 41, wherein said retrotransposase further comprises an endonuclease domain.
[0398] Embodiment 43. The method of any one of embodiments Embodiment 38 to Embodiment 42, wherein said retrotransposase has less than 80% sequence identity to a documented retrotransposase.
[0399] Embodiment 44. The engineered retrotransposase system of any one of embodiments Embodiment 38 to Embodiment 43, wherein said cargo nucleotide sequence is flanked by a 3′ untranslated region (UTR) and a 5′ untranslated region (UTR).
[0400] Embodiment 45. The method of any one of embodiments Embodiment 38 to Embodiment 44, wherein said double-stranded deoxyribonucleic acid polynucleotide is transposed via a ribonucleic acid polynucleotide intermediate.
[0401] Embodiment 46. The method of any one of embodiments Embodiment 38 to Embodiment 45, wherein said double-stranded deoxyribonucleic acid polynucleotide is a eukaryotic, plant, fungal, mammalian, rodent, or human double-stranded deoxyribonucleic acid polynucleotide.
[0402] Embodiment 47. A method of disrupting or modifying a target nucleic acid locus, said method comprising delivering to said target nucleic acid locus said engineered retrotransposase system of any one of embodiments Embodiment 1 to Embodiment 22, wherein said retrotransposase is configured to transpose a cargo nucleotide sequence to said target nucleic acid locus, and wherein said complex is configured such that upon binding of said complex to said target nucleic acid locus, said complex modifies said target nucleic acid locus.
[0403] Embodiment 48. The method of embodiment Embodiment 47, wherein modifying said target nucleic acid locus comprises binding, nicking, cleaving, marking, modifying, or transposing said target nucleic acid locus.
[0404] Embodiment 49. The method of embodiment Embodiment 47 to Embodiment 48, wherein said target nucleic acid locus comprises deoxyribonucleic acid (DNA).
[0405] Embodiment 50. The method of embodiment Embodiment 49, wherein said target nucleic acid locus comprises genomic DNA, viral DNA, or bacterial DNA.
[0406] Embodiment 51. The method of any one of embodiments Embodiment 47 to Embodiment 50, wherein said target nucleic acid locus is in vitro.
[0407] Embodiment 52. The method of any one of embodiments Embodiment 47 to Embodiment 50, wherein said target nucleic acid locus is within a cell.
[0408] Embodiment 53. The method of embodiment Embodiment 52, wherein said cell is a prokaryotic cell, a bacterial cell, a eukaryotic cell, a fungal cell, a plant cell, an animal cell, a mammalian cell, a rodent cell, a primate cell, a human cell, or a primary cell.
[0409] Embodiment 54. The method of embodiment Embodiment 52 or Embodiment 53, wherein said cell is a primary cell.
[0410] Embodiment 55. The method of embodiment Embodiment 54, wherein said primary cell is a T cell.
[0411] Embodiment 56. The method of embodiment Embodiment 54, wherein said primary cell is a hematopoietic stem cell (HSC).
[0412] Embodiment 57. The method of any one of embodiments Embodiment 47-Embodiment 56, wherein delivering said engineered retrotransposase system to said target nucleic acid locus comprises delivering the nucleic acid of any one of embodiments Embodiment 24-Embodiment 32 or the vector of any of embodiments Embodiment 33-Embodiment 35.
[0413] Embodiment 58. The method of any one of embodiments Embodiment 47-Embodiment 57, wherein delivering said engineered retrotransposase system to said target nucleic acid locus comprises delivering a nucleic acid comprising an open reading frame encoding said retrotransposase.
[0414] Embodiment 59. The method of embodiment Embodiment 58, wherein said nucleic acid comprises a promoter to which said open reading frame encoding said retrotransposase is operably linked.
[0415] Embodiment 60. The method of any one of embodiments Embodiment 47 to Embodiment 59, wherein delivering said engineered retrotransposase system to said target nucleic acid locus comprises delivering a capped mRNA containing said open reading frame encoding said retrotransposase.
[0416] Embodiment 61. The method of any one of embodiments Embodiment 47 to Embodiment 60, wherein delivering said engineered retrotransposase system to said target nucleic acid locus comprises delivering a translated polypeptide.
[0417] Embodiment 62. The method of any one of embodiments Embodiment 47 to Embodiment 61, wherein said retrotransposase does not induce a break at or proximal to said target nucleic acid locus.
[0418] Embodiment 63. A host cell comprising an open reading frame encoding a heterologous retrotransposase having at least 75% sequence identity to any one of SEQ ID NOs: 1-29, 393-735, or 799-895 or a variant thereof.
[0419] Embodiment 64. The host cell of embodiment Embodiment 63, wherein said host cell is an E. coli cell.
[0420] Embodiment 65. The host cell of embodiment Embodiment 64, wherein said E. coli cell is a λDE3 lysogen or said E. coli cell is a BL21(DE3) strain.
[0421] Embodiment 66. The host cell of embodiment Embodiment 64 or embodiment Embodiment 65, wherein said E. coli cell has an ompT ion genotype.
[0422] Embodiment 67. The host cell of any one of embodiments Embodiment 63 to Embodiment 66, wherein said open reading frame is operably linked to a T7 promoter sequence, a T7-lac promoter sequence, a lac promoter sequence, a tac promoter sequence, a trc promoter sequence, a ParaBAD promoter sequence, a PrhaBAD promoter sequence, a T5 promoter sequence, a cspA promoter sequence, an araPBAD promoter, a strong leftward promoter from phage lambda (pL promoter), or any combination thereof.
[0423] Embodiment 68. The host cell of any one of embodiments Embodiment 63 to Embodiment 67, wherein said open reading frame comprises a sequence encoding an affinity tag linked in-frame to a sequence encoding said retrotransposase.
[0424] Embodiment 69. The host cell of embodiment Embodiment 68, wherein said affinity tag is an immobilized metal affinity chromatography (IMAC) tag.
[0425] Embodiment 70. The host cell of embodiment Embodiment 69, wherein said IMAC tag is a polyhistidine tag.
[0426] Embodiment 71. The host cell of embodiment Embodiment 68, wherein said affinity tag is a myc tag, a human influenza hemagglutinin (HA) tag, a maltose binding protein (MBP) tag, a glutathione S-transferase (GST) tag, a streptavidin tag, a FLAG tag, or any combination thereof.
[0427] Embodiment 72. The host cell of any one of embodiments Embodiment 68 to Embodiment 71, wherein said affinity tag is linked in-frame to said sequence encoding said retrotransposase via a linker sequence encoding a protease cleavage site.
[0428] Embodiment 73. The host cell of embodiment Embodiment 72, wherein said protease cleavage site is a tobacco etch virus (TEV) protease cleavage site, a PreScission® protease cleavage site, a Thrombin cleavage site, a Factor Xa cleavage site, an enterokinase cleavage site, or any combination thereof.
[0429] Embodiment 74. The host cell of any one of embodiments Embodiment 63 to Embodiment 73, wherein said open reading frame is codon-optimized for expression in said host cell.
[0430] Embodiment 75. The host cell of any one of embodiments Embodiment 63 to Embodiment 74, wherein said open reading frame is provided on a vector.
[0431] Embodiment 76. The host cell of any one of embodiments Embodiment 63 to Embodiment 74, wherein said open reading frame is integrated into a genome of said host cell.
[0432] Embodiment 77. A culture comprising the host cell of any one of embodiments Embodiment 63 to Embodiment 76 in compatible liquid medium.
[0433] Embodiment 78. A method of producing a retrotransposase, comprising cultivating the host cell of any one of embodiments Embodiment 63 to Embodiment 76 in compatible growth medium.
[0434] Embodiment 79. The method of embodiment Embodiment 78, further comprising inducing expression of said retrotransposase by addition of an additional chemical agent or an increased amount of a nutrient.
[0435] Embodiment 80. The method of embodiment Embodiment 79, wherein said additional chemical agent or increased amount of a nutrient comprises Isopropyl β-D-1-thiogalactopyranoside (IPTG) or additional amounts of lactose.
[0436] Embodiment 81. The method of any one of embodiments Embodiment 78 to Embodiment 80, further comprising isolating said host cell after said cultivation and lysing said host cell to produce a protein extract.
[0437] Embodiment 82. The method of embodiment Embodiment 81, further comprising subjecting said protein extract to IMAC, or ion-affinity chromatography.
[0438] Embodiment 83. The method of embodiment Embodiment 82, wherein said open reading frame comprises a sequence encoding an IMAC affinity tag linked in-frame to a sequence encoding said retrotransposase.
[0439] Embodiment 84. The method of embodiment Embodiment 83, wherein said IMAC affinity tag is linked in-frame to said sequence encoding said retrotransposase via a linker sequence encoding protease cleavage site.
[0440] Embodiment 85. The method of embodiment Embodiment 84, wherein said protease cleavage site comprises a tobacco etch virus (TEV) protease cleavage site, a PreScission® protease cleavage site, a Thrombin cleavage site, a Factor Xa cleavage site, an enterokinase cleavage site, or any combination thereof.
[0441] Embodiment 86. The method of embodiment Embodiment 84 or embodiment Embodiment 85, further comprising cleaving said IMAC affinity tag by contacting a protease corresponding to said protease cleavage site to said retrotransposase.
[0442] Embodiment 87. The method of embodiment Embodiment 86, further comprising performing subtractive IMAC affinity chromatography to remove said affinity tag from a composition comprising said retrotransposase.
[0443] Embodiment 88. A method of disrupting a locus in a cell, comprising contacting to said cell
   [0444] a composition comprising:
      [0445] (a) a double-stranded nucleic acid comprising a heterologous engineered cargo nucleotide sequence, wherein said cargo nucleotide sequence is configured to interact with a retrotransposase; and
      [0446] (b) a retrotransposase, wherein:
   [0447] said retrotransposase is configured to transpose said cargo nucleotide sequence to a target nucleic acid locus;
      [0448] said retrotransposase comprises a sequence having at least 75% sequence identity to any one of SEQ ID NOs: 1-29, 393-735, or 799-895, or a variant thereof; and
      [0449] said retrotransposase has at least equivalent transposition activity to a documented retrotransposase in a cell.
[0450] Embodiment 89. The method of embodiment Embodiment 88, wherein said transposition activity is measured in vitro by introducing said retrotransposase to cells comprising said target nucleic acid locus and detecting transposition of said target nucleic acid locus in said cells.
[0451] Embodiment 90. The method of embodiment Embodiment 88 or embodiment Embodiment 89, wherein said composition comprises 20 pmoles or less of said retrotransposase.

1.-141. (canceled)

142. An engineered retrotransposase system, comprising:
(a) a ribonucleic acid (RNA) comprising a heterologous engineered cargo nucleotide sequence, wherein said RNA is configured to interact with a retrotransposase; and
(b) said retrotransposase, wherein:
(i) said retrotransposase is configured to transpose said heterologous engineered cargo nucleotide sequence to a target nucleic acid locus; and
(ii) said retrotransposase comprises a reverse transcriptase (RT) domain or an endonuclease domain, wherein said RT domain or said endonuclease domain comprises a sequence having at least 80% sequence identity to an RT domain or an endonuclease domain of any one of SEQ ID NOs: 3, 8, 822, 836, 1, 2, 4-7, 9-29, or 393-401.

143. The engineered retrotransposase system of claim 142, wherein said RT domain or said endonuclease domain of said retrotransposase comprises a sequence having at least 90% sequence identity to an RT domain or an endonuclease domain of SEQ ID NO: 3.

144. The engineered retrotransposase system of claim 142, wherein said RT domain or said endonuclease domain of said retrotransposase comprises a sequence having at least 90% sequence identity to an RT domain or an endonuclease domain of SEQ ID NO: 8.

145. The engineered retrotransposase system of claim 142, wherein said retrotransposase comprises an RT domain comprising a sequence having at least 90% sequence identity to an RT domain of SEQ ID NO: 822.

146. The engineered retrotransposase system of claim 142, wherein said retrotransposase comprises an RT domain comprising a sequence having at least 90% sequence identity to an RT domain of SEQ ID NO: 836.

147. The engineered retrotransposase system of claim 142, wherein said RNA comprises a sequence 5′ to said heterologous engineered cargo nucleotide sequence or a sequence 3′ to said heterologous engineered cargo nucleotide sequence, wherein said sequence 5′ to said heterologous engineered cargo nucleotide sequence or said sequence 3′ to said heterologous engineered cargo nucleotide sequence has at least 80% sequence identity to an RNA cognate of any one of SEQ ID NOs: 769, 770, 779, 780, 761-768, 771-778, 781-798, a complement thereof, or a reverse complement thereof.

148. The engineered retrotransposase system of claim 142, further comprising: (c) a double-stranded DNA sequence comprising said target nucleic acid locus.

149. The engineered retrotransposase system of claim 148, wherein said double-stranded DNA sequence comprises a 5′ recognition sequence configured to interact with said retrotransposase and a 3′ recognition sequence configured to interact with said retrotransposase,
wherein said 5′ recognition sequence comprises a GG nucleotide sequence, and
wherein said 3′ recognition sequence comprises a TGAC nucleotide sequence.

150. An engineered deoxyribonucleic acid (DNA) sequence encoding said engineered retrotransposase system of claim 142.

151. The engineered retrotransposase system of claim 142, wherein said RNA comprising said heterologous engineered cargo nucleotide and said retrotransposase are in a cell, and wherein said target nucleic acid locus is in said cell.

152. The engineered retrotransposase system of claim 151, wherein said cell is a eukaryotic cell.

153. A method for synthesizing complementary deoxyribonucleic acid (cDNA), comprising:
(a) providing a ribonucleic acid (RNA) molecule as a template for cDNA synthesis, wherein said RNA molecule comprises a heterologous engineered cargo nucleotide sequence,
(b) providing a nucleic acid primer to initiate cDNA synthesis from said RNA molecule; and
(c) synthesizing cDNA initiated by said nucleic acid primer using said template and a reverse transcriptase comprising a sequence having at least 80% sequence identity to a reverse transcriptase (RT) domain of any one of SEQ ID NOs: 3, 8, 822, 836, 1, 2, 4-7, 9-29, 393-401, or 427-439.

154. The method of claim 153, wherein said reverse transcriptase comprises a sequence having at least 90% sequence identity to an RT domain of SEQ ID NO: 3.

155. The method of claim 153, wherein said reverse transcriptase comprises a sequence having at least 90% sequence identity to an RT domain of SEQ ID NO: 8.

156. The method of claim 153, wherein said reverse transcriptase comprises a sequence having at least 90% sequence identity to SEQ ID NO: 822.

157. The method of claim 153, wherein said reverse transcriptase comprises a sequence having at least 90% sequence identity to SEQ ID NO: 836.

158. The method of claim 153, wherein said nucleic acid primer comprises an oligo(dT) sequence or a degenerate sequence of at least six oligonucleotides.

159. The method of claim 153, wherein said RNA molecule and said nucleic acid primer are provided in a cell, and wherein said synthesizing cDNA occurs in said cell.

160. The method of claim 159, wherein said cell is a eukaryotic cell.

161. A method for synthesizing complementary deoxyribonucleic acid (cDNA), comprising:
(a) providing a ribonucleic acid (RNA) molecule as a template for cDNA synthesis, wherein said RNA molecule comprises a heterologous engineered cargo nucleotide sequence,
(b) providing a nucleic acid primer to initiate cDNA synthesis from said RNA molecule; and
(c) synthesizing cDNA initiated by said primer oligonucleotide using said template and a reverse transcriptase comprising a sequence having at least 80% sequence identity to a reverse transcriptase (RT) domain of any one of SEQ ID NOs: 572, 602, 555-571, 573-601, or 603-728.

The application's sequence listing, which the Patent Office published only in electronic form, follows.

SEQUENCE LISTING (895 sequences)

SEQ ID NO: 1 - protein, 1311 aa, synthetic construct
MMYTTKSILCRRLPRLRQAENQVSSACRVRTEKGITLLEGVHEAILENSSTRCGSGVTKQPVATLEKGCSTTLTWRHLDILIAGMGWKNDSEVCVRTAKRRATKSSEVSVHQGTCCVDTGDFTDLTDNLSFVESNDGDEPSIGGQDEPNEEETSLEAGGEIEGTHANFLGEATLEVEEIQALEDPQPNLEIQEQAEMPNQEIQAQVDELPDQENQGEVNLRGRPIVDGNKIYYEYNSESGGAWECGQCPEAFPDVKKLESHYRGTHLDCVVKFNCSKCGRNFVANGILIHYRKWCKGRPIRVDPDRNPHQCSECDYSAASKRGLSQHERHRHPELRNLKRIAQRGEDARRKRTARKLIRPPGRGGKLWSAEEDDILERLCIVHQGTRLINMAIAGTGLLPGKTNLHIGERRRQWKEMKAKQVEEGLSEAMANISLEPPVLPTQRCLTELETYLEDVKGIAVKSDIGTTLWACLNDHVNGQALQSEQIDEITKKIVIELGKANPRAKRTGKTNRKKGKKANNGATEFSRIQRLFATRRKVLVKELLDGKRDADCPLDVKVVEQTYQGRFGGESKIVNLQGFPAPESLADNSELLRPINRLEVRQALGGMKNDSATGPDGVKVLPVKNLENRTGTISLILNAWLYSGIVPKGTKANRSILLPKTEEGLEDVGNWRPLTISSVVLRCYTKILAKRLLKALPLNERQKGFRQLPGCSENVTLVNEVISMAKQDSKELAIVFLDLAKAFDTVSHDHLVKSLKRFGVDMKFIDIVVQLYAEASTSFTVGLKMTDIILMLCGVKQGDPLSPILFLACMDPLMCSLETRGAGLLLAHGVTVTTMAYADDTAVVAGSKAGMEKNLELVKEFCLETGLKLNVKKSVGFHLRPIGKSYTVNEGSQFECGGEAFPWVMPGSVTKYLGAKFDPWRGIPVVDPCKKLEGWAQRIHRAPLKPRQKVSLLSDYACARLMYHMSTATPSRGRLDNLDSIVRYWVKRWLKLSDSTNTHFFYTGWKEGGLGISKFAASVPHMIVGKFEAVLRSKDPVLVTLSGIRNLRQRVDKIKEKYHVCGLKTDTQKASWREEESKSWAKLISQGKGVECMAGNPQSNTWINGESFMTESEYIAALQLRTNTYPTRECTNRGRAGANIMCRRCGLAVETIGHISGWCLEVKDNRIARHNRIVYKVKAMAEKKGFRTLLEPKVKVDGRTLVPDLIIYDGASQKAIVIDPTVVWDDSGTALDDAARRKVEKYTCIIPAVKTLTGCKEVRIQALVMGCRGSWHGGNDGLVQPLGWKRHDIKNLCLLTLCGTLKLIRYFMDK

SEQ ID NO: 2 - protein, 1021 aa, synthetic construct
MYILRNVIQTQLTKNQSGSISAFGAIFPVIPKLVLVYMHVVPXXXXXXXXXXALIKYFPDRSLESIKGARKNLKYKEILSSLKEAIASNNLTAPSFNDTQNISVESINPDSPMSSLRRSNRVLPASPLNLNSRRRRLPKRPDAEPDPESDPDPDPDPLPASLPNPIIDDDPFISAIRNSYDCDQELKRLCELGFDLTLDYNELNNYIKNRHTYPYKSNKVTKNTDTTNYRRKIKLKRYARFQQMYRRNKRNLADMIINDKEEASVFPTEESIRQTYQNLYESVSPADDHPITDYKVSGSCYFPIDTAELRNHLKTMNASSPGVDNVTLQHLRELSPDYILTILNFQLWAMTQMETWKTNKTILIPKKNEGLENASNWRPITLSSMFTRLLHRILASRISNNTSLNPRQKAFVPVDGCAQNTLLLDNLINSARQEHKQLSIFGIDLSKAFDMVSINSIRRALRRHCIEEQLIEYIIDAYSDATTSITCGSITINNIKLLRGVKQGDPLSPILFNLIIDELIDILPPEIGGFVGESRVNCLAFADDIILISESKVGMEQLIHKTEDFFNKRSMKINGDKCFSLRLSTTKKDRAPLIIKEPSYKIDGNWVKATGYDDFFKYLGVKFNPHGKMKPNINQLETMLHRVKQAPLKPYQKLELLRNNVIPKILHEMVLGRITKGLLLAYDTKIRGFVASILDLPHDIPKSFYYSKIKEGGLGLPSLEYSIPRSLLRRVEKMQYSNDEVIKSLYNHHLTEKLRNKCLTLTEMLDIPSALSITNHNKFKNDLYSKIDGKPLAEFKSNDSGQLWLTGKTTIVTGKKFKQLVKLRIGRLATLENCNRGRDVNKSCRKCSRVNESLQHVIQHCHFTHFDRMRRHDAVAELLKQKSLENGYTVMWEPVFTLTGEKLKPDLVVITENTINVVDVSIVTENMRFQHCNTPSTLEGAWDWKVVQYEKEELTNQLKASFGEKPVWYGALILSLRGIWCSKNDITLKRLNISKSIKELIIVRSMEHSVTIWSHFMNSVI

SEQ ID NO: 3 - protein, 1120 aa, synthetic construct
MSHSTAAASSGAATGPIVIRYPVNTTNGGTTGEQACFFAESSNCGLAFVDNKSFVDHLLRAHKATRDQIQYICSHCHRQFEKIESVRSHHNICKRKEAVAPDLDARLPVECEVDGCSRRFTTTSGMRLHVKKAHPIEYHASIPQSKRNLWSEGEMRMLARMELDNPGLTNARMNELLHSLHPSRSVDVIRHMRGRNTRYREIMEELVLIGVPEDSDSQAEKTAEPEPEGRINECQLEELVKTHSQIDDARYQASIEYVRRVLRSDDPGEFFNDWLFSCFPGKEGRRIQRRKRERLPPRNAKQKRAAEFRVLQELWRKDRSRLATVILDKMPPTAKEPPIGDIEKVYTTRFERPSPEDQHEFTSKPIEEPMEMVRFITVEEVLKNLKAMKSNNAPGLDSNITMKRLRSLPLPCLQLVFNCWLAIGKAPQSMKQCRSKLLPKGAEGLDDVNNWRPLTIGSLLIRLYTRILAMRLQSKVQLHPRQKAFQPLDGCGENIAIVSSLLQDAHERKKELNIIFLDIAKAFDCVSHHSIQRALNRFGLPRAFRRVIEDLYDGATTVFQTSEGDSKTLGISSGVKQGCPLSPVLFNMVMDELIADAPSTEWGYELHDESVGLLAFADDIALVSHSRAMMSHALDYAAGFFEKRNLQLNARKCIGLSIKKAPRRKVMRIEMGSIWSLRNGSDNIPIKMLSPADMARYLGALFSPSGKQTIDLATMKGWITSIEKSRLKPHQKLVMLRTYLLPRVLHHLTIGEPNATTLRRVERELRNSVKRFLKLPVATATPFFHISTKEGGLELPPLLETIAKRKLKWEIRLQKSKDSLIRAVADSPKFRKQFDKARAWIGVPVINRPSDINRRIRELNNGRFERFTSELAVQSRCHRALASNPLRNDWLTGHNPGLYASQFIDALKLVTSQLPTREALNRGNPQADKRCRGCGFSVENQKHVISNCPLVQQERHLRHNRVAQLFARYAKEKGWNIIAEPRIRNPSGEIMRPDIVLRRDDNVAIVDIQIPYEDGGREQLAERYRQKCSKYRQLSTHIQHVLGVTNHTIGAIIVGACGTWCELNNPILDYIGVNTTAIKKNLSIEALRGTLKIFGQFKNRVFRNERVHPSQRPSSGPPVP

SEQ ID NO: 4 - protein, 1221 aa, synthetic construct
MVTIYTEFKTDPGAGARVVALRVDAGAKAGYVILRSEGVHGHGYSGSGSRDRALSAAGKIDEPMETLDRKSSFRLPFKILIFESGRREMDGELSPSLDFVNRALDVQESREEEALTLGSEEPTEPLSNGSVYMPASSTERGIADLAEDGQTGKLLIPMPLRTVACPCNQVFCNVYEFEIHMERAHMGIDVKYTCDLCGKHCLRVHGAKIHRSLCRGNTIRPVIPRPWKCEACEEAFRSKSGLSQHKRHRHPALRNLERKAKYVKEPGQAKPLFKATKLWSIEETKRLLELENEFQGNKNINKLIAAQLAGKSNKQVSDRRRTVHKAKTNISQDKGVTAGRNEDRVTGPGMAVSETVTDPEAFWDFVTGARNSGVEGESHQKTLQVLVDLLQEGNVERACSQVSEILADITPVTKPQSKSKKGQGPKNRRKSQAKAEAYRHAQQLFETNKKSLVAELLEGAESTKCPLSVETVYEAYKARFETESPEVDMSHFPPPVNGMDCDNILKPITGEEVYKAVRKTRPDSASGPDKIDVRSIRKWDPRGIKLAAVFNIFLLTGKVPDAVRPNRSILLYKGGETTQVGNWRPLTIGCMVLRLYTKVLAARFMFATPISPCQRGFVSGGSCNENVHLVEGLVRDAKRRNKPIGVCFLDLAKAFDTVSHKHVLAGLTRFGASKHVTRIVEDLYRGASTRFTIPDGTTGEIEMKRGVKQGDPLSPVLFNIALDPLFCLVEKAGVPYELEDGTPVSVAGYADDTMVVSNNKNDLQANINLVEEFCRAAKLKLNAKKSYAYTIRPIAKTYVVNCGDQLRIEAEAITWIEPGDTAKYLGVEQSPWIRKVKDNPTEDLKSWCSKLGRAPLKGRQKLLLLSRHVLPKLKYRLANSDPSKEVLAGLDSVSREYTKRWMNLPACVSSAFLHCSVQDGGVGLPSLATEVPLDKIGSMSRLIGSQDGHVKRLAKAIGIEEQLETTCRRWEIRRPLNKMRCVVNEIRKRRRVEWENLGSQGPRGPYWRRCRASNGWMRRDVLSEGEHTVALQLRTNTYPTREAMSRGRKGTNVMCRRCGQSVETLGHITGQCLAVKGNRIKRHNKVCGILVSAAQSQSWEVMIEPHFKVEDKTYIPDLVFLRGEQAVIVDPTVVWESNSNSLSEAARKKVVKYNPILKTVKDLTGKSSVLLFGFPVGGRGTWCRGNNKVLDALGIPRSKAQYICLTVLGDTLRMLRVFMDK

SEQ ID NO: 5 - protein, 1355 aa, synthetic construct
MAERNCSATYIEGATAPSSASSGVGAGDDCPEVVDPPGTATCEVCDAKYRTGRGLSLHQRSRHPEWYHSRKGPAFVRPGWTREEMVLLVRGEVRLVRAARRRGEEGRVKVNAELCRQFPGKKRDSIVNVRKTKNYRDLRARLEIELEEESDEEVERVVPAPEVGLVPVEMREGGGGGEVGLVASGGGGDLSPTPSQVERKWVTPVPKDRKGPKLRWGEELLEEVAREELRLSGLNTRFMNAALRNSFPSRTLEAIKGMRRKPKYKLLLASLCAPNPAVTPPGPSQSEEGTMLPEVEGSGEGCSPEREFVTPTVSVNFTGPLQPTFVEGISPPSVIRLPVASDPPKGGRPEIVSDECNVTGLVHMDSVDHDCTLVPTESTIGDITLCDHSVVEIDSLLVDTPPRRREGEVIESTVRDDRRGDEGGEVRLPTEPDEDSESESEPSSQPCNPRQGDVSQTVGEGGGRTVAGREPMDYETWEAELREELVCAQGFLAGMDSLEFLDFQPGQLSREHREMLDSEYQRWVELELGSSHRRKGPRRRARRREAAGRKEAAGPAEAGGRRKRRRTEYARVQKLYRSNRGECSRKVLSGEWRSEETPSIPLEDQVVFWSRVFGEESVPDTRTGSPQGMVLWGLVEPITVEEIFSTLRKTKDGAVGLDKISRKEISKLNPRALQAHFNLWLYAGYQPIEFRRSRTVLIPKVQEPSGPGQFRPIAIGSFISRVFHRLLAERLSGLLEFQSRQRAFVKGDGIADNVFLLRCLLRDTCVDLKPMCLAFLDVSKAFDSVSHATLLLAAERMGAPGPFISYLRTLYSEASTVLHVDGRFSDSLKQNRGVRQGDPLSPLLFNCVIDWALASLDTEMGKVVGGGPRLNHLAFADDVVIIAESVVGLQHLCGQFERSLGRCGLTLNVEKSRTLRIAVDGKAKRWVCEPTPFVSLAGGLMPAVTITQAYKYLGVHISARERDATPEELLTRGLNQLKAAPLKPQQRMYMLRTHLLPKLHHKLVLSRSRGGVLNRLDRLVRKSVRSWLALPHDTTNVFIHCDSRHGGLGIPALRLTIPLMKSARLRRLAALRDPVFVALIASSRTFAEEVRRCGEPVKIGDSTVTSAPAVKEALAEQLYSSADGYGLRSSAGVPYVHSWVSDGTALMSGSAYIHAIQVRGATLATKKRAARGRPDANTACECCGRTETLGHVLQVCHRTWGSRIKRHDALMEKFLHSLEIRGGSILRAPVIPVVGGSPQKPDGVIYFQSHCWVVDASVVADNADLDNAHLSKCAKYDTPAVRDWCQLNWPSHEGVRGSIRFGALIFNWRGVMSRRSARMCDELKVPRATVKLFAVGVVEAGWRMFREFHRSTAQW

SEQ ID NO: 6 - protein, 1109 aa, synthetic construct
MPAGTSPPVRWQDKETVPVIAAESDGRCLDCGKQFKGQRGLSLHSRSAHPELYHKKGSAEIAQTIREQTRTRWDGEESAVMAHEEVRLLRQGCMELNKELSKFMTGRSFHSVKSHRRQQSYRALVKAYVPTTGGLGVKEVAIPPRKTTRVVGEMAPRPHADPREDEVGQPLQRPAARVAEACPPRLHSPPQQSTNQPPAEAAEVAFPWPNPLDEHEVELPETVGIDTPTRAKVAPTQEQEIHAGDEFDWRTPIRQTIIDLATGINIQPELLQSSTQNPPADSGRLQNLIDQDIMELLPPVVRKGQNMRPGVQRRVAQSSREKRRAAYSRTQALYKKSRTSCARTVLTGKWREVAPNLSLREQEAFWAPLLETPSIPDRRAPPGDGAPEWDIMAPITTDEVARHLRGMKDGATGPDNRTLNDVRKLGVAALACRFNVWMLTGIAPEAFRHGVTVLIPKTPEGAEPHDYRPITIGPILGRAFHRILAERIERHYRICGRQKAFRKGDGIGENTFLLRTVIADRKARNQSTNVAFLDVSKAFDSVSHDSIFLAAASAGIPDPLVTYIKSVYAGSQTQLRVDGTLSRAISVNRGVKQGDPLSPVLFNSVIDLALRKIDDEIGVSIGTDKLSCLAFADDLVLLASTPRGLQSQFKNIELALGKSGLKLNVNKSATIRLDVDGKRKTWVCNPSDFLRGQDGQLVKAMSITDGYKYLGNSVSAGVTLGSTVQDLQRGVRELTAAPLKPQQRMYILRNNLIPSLHHTAVLGCLHKKSLKFLDQITRAAARAWLRLPKDTPLAFFHADYQDGGLSIPSLRWTIPLMKTKRMAGAVASRDPMVRAIAQLPIFARERRRWSAPLAAFGVPIINGAGLKRAMAVGLHTSVDGHGLAGSRVTGYVNHWMVSGTALMSGSGFVNCVRIKGNLPYTKARAARGRPERSVKCDACRGHETLGHILQTCPRTHQPRNDRHDRVNKYLTSTLGKLGFTTRVEPAIATPAGVRYPDLIVWKGDTCAVIDTTIVADNFDPDDAHERKVVYYDTPAIRTWCADISGVPADKIKFSACVLTWRGMPSTRSVRELQALGVSKANWGLMSVKTLEGAVESYAHFGKSTAGFSG

SEQ ID NO: 7 - protein, 1151 aa, synthetic construct
MPLVSEVNDGECVECGKQYKNKRGLAIHERSAHAEIYHARCATIIEETHRTQRKSRWDSEESAVMARAESKLVRQGLYAINQALVKVTAGRTLEAIKSHRKLPAYRQMVRSYLRTTGGLIVDEAVVPARIVAEVTGGATSGPQDDNSRQVDDRSSPVATRVAEVRSPGPQPATLAFASGPAGPTGRSNGRNMTDNQITTMADVHQVLTGRIPSGAICPPDGKNKRNVTPRPEARVAETRPLSPIITRWSDDETDGDPLPETQNVNTPVREDRERVSQGIAEGIVGGYDWRAPVKTELLNLAIDANICPELLHEVLLSPCGDRELLQELIDVDLLGFFPPAERPRRNVRRRPEQQAPVTSRAKRRAAYSRVQALYKKSRTSCARTILAGKWREVAPSVELREQVAYWKTLFEQESQEDSREPPAEGPPEWEIVNPVTKDEVARHMRGLKDGAAGPDGKLRKDLKGLSTGALAARFNLWLLAGMAPDAFREGVTVLIPKSNDSTLPQDHRPITLGPILCRLYHRILAERVERHYRISERQKAFRRGDGLAENCYILRTVIDDRKARCQATNIAFIDVSKAFDSVSHESIFLAAASAGIPDPLVDYVRSVYGGLRTRIRANGELSEVIAVNRGVRQGDPLSPVLFNAVIDLALRHIDPEIGVKVDSERLSCLAFADDLVLLASTPQGLQKQFSGVEKALCRSGLALNVGKSATLRLDVHGKRKRWACNPVGFLKCRNGGTMRAMSVTDGYMYLGNTVSAGVASEKSVLILKAGISELTQAPLKPQQRMYILRNNLIPSLMHSAVLGSISKKSLKFLDTMNRAAVRSWLRLPRDTPFGYFHADFRDGGLSVTPLLWTVPLLRTKRMTKLVASPDPVARAVSRLPIFARERNRWSRPLSAYGLPIRDAVGIKRAMAEGLHTSVDGRGLNGSFASGHVNAWMTSGTARMTGSGYVNCIRIKGNLPYTKARAARGRPEKPIRCDACNEVESLGHILQRCSRTHQPRNDRHDKINKFLTQSLKKLGFHTQVEPPIPTPQGVRYPDLVAWRDGRCVVIDTTVVADNRNPDEAHARKATYYDTAGVREWCADKSGVPAKDISMSACALTWRGIPSQRSVRELATWGITKSHWQVMSIQALEGSVKCYAHFFHSTSGTRAVP

SEQ ID NO: 8 - protein, 1056 aa, synthetic construct
MYPTSAEVPQPCPVCLSSLIDPKQIRDHFRKKHHGVLMHWTCRKCGRFWPNNKSAASHYRYCIKSLPSLEGPSKSHKCIECGGSFSTLAGLQLHRKRKHPEAYNESLPRPTGKNRPWGDDELKRLAAVELDSGGTKHINIKCQKHLPHRTIEAIASIRKTDRYRIILREIRSSRSISRETREEATTSTPDSSNVLERLTSRIAELKSGDYSPSVEAILAYTERCLEDRNASSGLSLLPSEMYMPKPTSASKINRGMRTPFRPQNRTQRRRQHYQQVQLLYKRDRKQAAGVILDGSPLHVVQPDVEKVDEIFRSRFSRPSPPDDAEFISSPAGVLNMDYITAGEIQQCRDSMKKNNAPGPDRNITMDVLLALELPVLELLFNTWLALKQVPAAFKTARTILIPKSGDTSDPNNWRPITICSLISRLYAKLLASRLSKCANLSERQKAFRPVDGCGENTAILSAVIAQARKTKSQLHVVFLDLAKAFDTIPHTSIVRALKRKALPGHFIDVVENLYTEATTSISVGGKNTSSMPLTSGVKQGCPLSPILFNLVLDELITLIGDDNGVDLNDKKIAILAFADDLVLLSPTTDGMETNLKLCEGFFDKRSMKLNARKSVSLSIVRAHKRKTMLTDERPKWKVHGEFLPTIKHTEEIKYLGVRYSAAGRSIAKFPKLDQWLQRLKKAPLKPQQRIQMVRSTITSRLIHTLRLSRVHAKLLKDLDRKIRSFVKSVLHLPSGTSTDFFYIPVLKGGLGLQEFMTLIPAAKLKLINSMKKSSDQAVIAAMEVDHWLREERWCRKVTLNQGNKNDAERRRLARYINSPRGKSQVGFANLPGQCRWLEGGAKLTGHEYIVGCHLMSNTLPVRTRTFHGGRDRVVTCRYCPGVLETPSHALQSCPVVRNAVTKRHDLILTKLQHFLTPNYDSVIREPWFNGREGRMNPDLVLKQGKMVYVVDLTIPYDSSPEFIDSQAQRKVAKYDTLKPLLQQKFQAERVEVIGLALGARGMYTSAGIQTCLKLGLSDRQRRYMGMMALRLTCAVWGIFRSQPSGLFNKVPDTGTT

SEQ ID NO: 9 - protein, 1005 aa, synthetic construct
MRTKHPQAYEESKKVANIRIAWSNDEDNILANLEISLKSTQKGQILERLFNEWNKLVVQSHANYRSKDAIRARRQQQEYKAILRDLIQKQDDTNASSDDNDSSTDSDSPSIPATICNDMNAIHKLLNDIVIAGHIKLSDHMKNAIDAFLNPNKAIDPVKLTMSGINQSITDIRNKNNNNRNSSRVNGTATAINKKPARNKSRIEKSKQHAYYQRLYLKNKSRLMDEIIDGVAPNVDPPPIHTAIQYYEQIWSILVQDTHPVTTKPDFNNKDNTLLSPITKVEIQWAIKKTKRDSAKGVDQITLQEAKLLAEDDLYIAFNIWLGCKTIPSDLKLNRTTLIPKGKQGLDMITNWRPITISSILLRLFNKIIACRMNKYFEIDKRQLGFRPINGCSMNILWLHHLLKHARLNRRDLYVCLIDVAKAFDSVPHESIFRALVRHHAPSSFVELVRNQYADSYTSITYKNLSSKRIKILRGVKQGDSLSPLLFNLVTDELFGILKDQLGYNITNIGSSNIKCFADDICLISGSRIGMGHMISETVSFLNDRNLQVNANKCMSIGLQKGFKGKKSKIVTEPIFTINGSLIPILGHVENHTKYLGIQFTSVGMVNANVAKDRIIMVLNKLQKIPLKPQQKIDLIRSHVIPLFIYQLINLENYPKLLKEIDILIRRAIRSILHLNIGLSIEFFYLPIRDGGLQIPLLRDIVGLAKVRIYKYIMRSDDELLKHLVQKQAFPILHRFINELKLDSSYETSDIKLRKIQLVKDRRVSYAGKVHGYGSEVFSTCPSTNFWLYGDNKTVTGRTYINGIKLRTNTLETRVTVTRGCMVDKTCRMCKEENESLMHILQFCKTTKGLRYARHNSVCARVVKKLKERGFQVYVEQAYTTDETGLPTLLRPDIIAVKLDHAYVLDVQAVYESSGASFINAYKFKVDKYTPLIQAIKNRHKCKDVTIHGLIIGSRASFHHGHIRIWNEFGFSSSELKYMALNCLENSLRIWSTFNFNRLNSFNRS

SEQ ID NO: 10 - protein, 1009 aa, synthetic construct
MEVAGITPGNGEAIGVEVVFPDTQERVQMGVDEDDNTRHPVSEIEEGAGINPGNGEEVDVDAIHSDSQEQMRVDEDENAGHPVSENEEVVGNAPDNGELEVAGVTPGNGDLVDVHLVSQAAGIDEAVGSGLHVGAGIAPSESVEAFRAALRSLVVEGGLSGLVRDAVVNVLNDEGGERIGSVLKDLVQAIGLENATTPGTARRPGHRGGFGRHRHVGNKAASMYAGFQAMMTRNPSEVARWLWEGRAGEEGNVVPPMDHLVRIFGSVMSVDGVEDNEQIASCQEGVKVFYPVTSQDLDKALNKANASAPGLDGLRIESLKRMSGDNKSNAVALVNLALLAFGNYERTVRTVMIPKSTEHLEDADNWRPIAIASHIIRVGHRVLAHRLESQVKLHPAQRGFTRGDGLARNVWLLDAIIKHARVNNRTLCVVSLDIKKAFPSVSHSSIARAVDRFGCSPVFCEYIRSVYRDNATVLQCGKSVSDAILVKRGVRQGDPMSSVLFNMVMDELLCLLDPALGYKFDGTCVKAMAYADDLVLVARSVGAMKKLLTGTEEFLLKRGLMLNEKKSVALHLRRGKRAVVLSLEEVWSLREGAIGMVSEIKSLTYLGVRFGPYGKMNYDTKPLSDALGRLCRAPLKPDQKLLLLKTHLLPKALHSLTLGCCDKKLLKTLDMRVQHAVRSILHIKKDVPCAFIHGPSKHGGLGVMSFVADVPRHVCNRIEGVQLAGEGGEMRALVDSFYFESILRKLRTPATQVPDEYVAHLSRKNCRRNMSVRLKQADMSSKYDTRGITEVAEHGDSRAWLASKPVFWPARTYVNAVQWRCLSITCRSRVSHGRAGDRLCRTGCGKIETAFHISQVCPSTHLARVARHDRIVQLIKRSAESKGHAVVVEPRITTAAGIRKPDLVIANARSKTVFVVDVHVAWKGLRQAFDAKVKKYGRHKEISDFGRTLLPEAERVQFGAIVVSPRVIWAGANEQVVNGLQLPHGIRKVVLASCVEGTMKILSAFNAVQ

SEQ ID NO: 11 - protein, 1347 aa, synthetic construct
MHRSSPERRILDGGAAAPPSTLAGPDGNEPGSWVTCGLCGRRFASARGLSQHERKEHPEHYHSVNIPKVVRQGWSNDECVLVAREELRLVREGKKRGVTGRVNVNADLCRAFPHRTMDAMKGLRKNLKYLSLRTRLADEEMVRPPAEAPESPERVFTVGDEDRRWTTPEPKDRRGPKVRWSNILLDDVAMCEAQLSLGGCTNYNIELHKIFPERTLEGIKGMRRLAKYRVRVARYLAEEAAQGTPPGMDRSPHGPSGEREGDMPRCGRNESSSGSEGPAFDCGDTPPVPPCNPGRLDENRTVRDGDASGGDSPRDNRRPRGEDIGPRERGLGAHTERTSPAREVGEGASRPGETGVVPPIPLCNPGRQDASQTVRDGDAVGGTTMVDTVSLVDVSSPSWASQIDLLDLADGTEAHVNVETDSPAGSPAGGSSWACPAEEIPEAADPSEPMLEVPSANTDNINRDHDSWRESLRQELVLAQGYFVGWDSLEFLDFRPGQLSREHKMLIDSEYEEWVRLELGSAHKRKGPRRRARRREAAVREEATGPAAPMSKRKRRRADYARVQKLYRANRGECSRKILSGEWHTEAPPSIPLEDQVFFWSRVFGEASQVDERVVHPQGMVLWSLVRAITADEIYAALRKSKQGAAGLDKISRDDIRKFDPRALLAHFNLWLYVGYQPAEFRRSRTVLIPKVPDPSGPGEFRPIAISSYISRVFHRLLAGRLSGLLEFNSRQRAFVKGDGIADNVFLLRCLLRDRCDALKPLSVAFLDVSKAFDSVSHASLLLAAERMGVPGPFISYLRSLYTEASTVLQVDGQLSGPMVQNRGVKQGDPLSPLLFNCVIDWALASLDPEMGVIAGEGPRLNHLAFADDVVIICQSSIGCQHLCRQFEKALGRCGLRLNADKSRTLRIAVDGKAKKWVCDPNPFLSLAGGVLPAIPITQGYKYLGVTISARERDATPEELLRRGLKHLTEAPLKPQQRLYFLRNHLLPKLHHRLVLARTRGGVLRQLDKLVRRGVRQWLKLPHDATNAYLHAEVRDGGLGIPSLRATIPFMKRDRLERLAGSSDPMISHMVANSGTFARECANCSRPPVRVGSTLVMSRDEARRVTAEQLHASADGYGLAPSAAVPFIHSWVSDGTALMTGGAFIHAVQIRGATVSTRRRSARGRPEASYSCDACGRPETLGHILQVCHRTWGHRIKRHDAVLEKLLHELERRGWSVLRAPVIKVRCGSPQIPDGIAYKDGICWVIDASVVADNADLDDAHLSKCTKYDTPAVRDWCQSNWPSEVAAGVVRFGALVFSWRGMMSPRSARMCHELGIPQGNMKLMACCVVEWGWRIYRVFSRSTASWV

SEQ ID NO: 12 - protein, 1314 aa, synthetic construct
MSLGKSDGQCAASTSRCEGGAQGPARTPPLQRGTPPPAQVTPGLSHSTRDNPEVICLDTPPAMPATSLPATLTTTTVTTVACGGPIMSTLGLPTGGHITSPRPSPASDQQTPPGAVWVTPMERTPIPSGEVERRQQGAVTPSPPPPQETSRDEGDSDGPWRVRLGRRARRRLSSGSSGGKSPPTTSADNNNNSLNLQNNLINNNVEVSMSNNILQQANAFLVLGTSVASGPSPLDDGGAPGDMRAEDHSAGHPSVPVSVCGVMGRPRGARASVDSGANEQTPSEPQRGGGGHHRRPRRVEVAPVQPFRGQPAPAVAARQRRRQRVVARDALVGRAEAVASLADLEEFAASVALFFGEEAVGVARGDAPGARDRPVRLRAARGRRGEGRVPARDGANVERGPVPAGPQQRQLGEGRGDWTREAKRIQALYRVNRRRAIREVLQGPAEFCRVPTRRVQAYFEDLYRGGERLDNAGAEAERVDPPRREDVELLMAPFTEREVDCRIRRMNNSAPGPDGLTYRDLRAADPGARLLAAFFNACYRLEAVPASWKTSNTVLVHKKDDPGLLENWRPLALGDTTPKLFAALVADRLTGWAINNNKLSPAQKGFLRDEGCFEHNFVLQEILTEARRARRQAVVAWLDLSNAFGSVPHAVIRRALVRAGVPGGLINVWGSMYDGCTTRVRTADGYTAPVPIRSGVRQGCPLSPIVFDFAIDSVLRAVTAVDAGFDLSGLRFSTLAYADDIALVADSPEGMRRLLAAAEDGASSVGLRFNPAKCATLHIGEGAGGRVLPTTFVIQGQSVHHLACGEPYKHLGVPTGSAVDQTPYATIGGLLEDVRAVDRSLLAPWQRVETVAVNLLPRLDFLLRGATVEKRPLTVADKTIRRTAKAWLNLPQRASAEVVYLPPSLGGCGLFPLADLADVLSVAHVFRMLTASDAAVRELAWSSLRGVVSRRIGRRPSNDDIAAFLSGSLEGRMRDGGEKSLWSRARNAARRQSERLSLRRVWSEATGEMIVECRGTRGDTVRVPPEARSQVITRLRSAVMAFYCSRLSSKPDQGKVFEVSSRARVSNHFVRGGSFTRFADWRFIHRARLDVLPLNGARRWGEGDKRCRRCGQAAETLPHVICHCGVHSAAIQLRHDAVLHRLWRACRMPGEKRVNQRVEGVHGELAELRPDLVIRHEPTKCVVICDVTVPFENRRQAFHDARARKLAKYSPLAEALRREGYRVVVTAFVVGALGSWDPANEAVLRLLRIGNAYGSMMRRLVVSDSIRWSRDIYVGHVSGVRQYAAPPRPAVDGALATPPRAIRRRWPANRVNVN

SEQ ID NO: 13 - protein, 969 aa, synthetic construct
MAGLQLHRKRKHPEAYNESLPRPTGKNRPWGDDELKRLAAVELDSGGTKHINIKCQKHLPHRTIEAIASIRKTDRYRIILREIRSSRSISRETREEATTSTPDSSNVLERLTSRIAELKSGDYSPSVEAILAYTERCLEDRNASSGLSLLPSEMYMPKPTSASKINRGMRTPFRPQNRTQRRRQHYQQVQLLYKRDRKQAAGVILDGSPLHVVQPDVEKVDEIFRSRFSRPSPPDDAEFISSPAGVLNMDYITAGEIQQCRDSMKKNNAPGPDRNITMDVLLALELPVLELLFNTWLALKQVPAAFKTARTILIPKSGDTSDPNNWRPITICSLISRLYAKLLASRLSKCANLSERQKAFRPVDGCGENTAILSAVIAQARKTKSQLHVVFLDLAKAFDTIPHTSIVRALKRKALPGHFIDVVENLYTEATTSISVGGKNTSSMPLTSGVKQGCPLSPILFNLVLDELITLIGDDNGVDLNDKKIAILAFADDLVLLSPTTDGMETNLKLCEGFFDKRSMKLNARKSVSLSIVRAHKRKTMLTDERPKWKVHGEFLPTIKHTEEIKYLGVRYSAAGRSIAKFPKLDQWLQRLKKAPLKPQQRIQMVRSTITSRLIHTLRLSRVHAKLLKDLDRKIRSFVKSVLHLPSGTSTDFFYIPVLKGGLGLQEFMTLIPAAKLKLINSMKKSSDQAVIAAMEVDHWLREERWCRKVTLNQGNKNDAERRRLARYINSPRGKSQVGFANLPGQCRWLEGGAKLTGHEYIVGCHLMSNTLPVRTRTFHGGRDRVVTCRYCPGVLETPSHALQSCPVVRNAVTKRHDLILTKLQHFLTPNYDSVIREPWFNGREGRMNPDLVLKQGKMVYVVDLTIPYDSSPEFIDSQAQRKVAKYDTLKPLLQQKFQAERVEVIGLALGARGMYTSAGIQTCLKLGLSDRQRRYMGMMALRLTCAVWGIFRSQPSGLFNKVPDTGTT

SEQ ID NO: 14 - protein, 1269 aa, synthetic construct
MDAHVDLALPCIRVCSPKCIKPLATTTRNKTSVLSVMEQVPSRVDSDSLHGAQSIGGAVHSCVDCGRSFDSVRGLKQHVNRFCKGKAAGSSAEGSEVGTVAESSAGGDVQTSTTELIQCPAVTTSKTGEGSATCSQKLEHVQTPSRQSADDSVEDLDPRMCVHASTGTHCEKCQWCGRCWLTLQSLRQHQRRTHREEYQTKLCEEHQLKKARWTKEEEVRLAETEVELRKSGQFRNLNVELAERFPTRTVESIKARRHRSETYMQLVQELSEHCPGLLEMASIRGSTSTIGEQGDAHGDAPSEVASTEQADNYAVLCAASEFPDQNHVSSVQTSAVVHHSIREENEFDDSIFGPVSGSTAVGIGAEMSEKKDTTAQSPSELSDWKNPIYYYIEGLPVATTVDDSGERLLDRAFEMEKGALTDVRDGLIDRHAQQFLWITRDGQKRHQRKGDSRREKRESRKSRLGQDTSAAEGTGGPSRRAKRRQLYALLQKLYEKDRNHAAELVINSEWQGLLEKKVVNKEAQVLYWKQLFERRSVPDQRPYSTQVVKWDLLEPITVEEVQKQLLQAKETAPGPDGVELVDLHSYTARHLCKAFNLWLLRGRVPEALTKSRTVLIPKKLGAEDPRDFRPITVSSLILRIFHKVLMDRLQRHISINPRQKGFVPVDGCFENLYLLDAILWRAKRYLRPLFVAFLDIKKAFDSVNHDSLVRALKKNGIPSPLCDYLSSNLRLGKTELHGQPVEMRRGVKQGDPVSPFEFNLVMDDAASYLNQHLGVEFDDGEQLTHGFFADDTFIVAPSLAALQQQLTKFESGLQANGLELNVDKCYWFGIEVDGKHKRWFQDMRGELNFLGEKVTRISPADTFKYLGVHLNVFGKRMFDPARLVTALHSTTSAPLKPQQRIYILKNYIIPRFLHQLVLGKVSQQLLASVDRIVRKFVRQWIAFPTDTPLGVFYAPVRHGGLGLPQLQGLIPNLRMIRLQRVLSAESDPLILHISADTEFADDVYKRCGWPARVKGLRIGSKKELNDYWVNSLYSSVDGRGLREASNVPQVHTWVDDGSKILSGSQYIHWLKVRYNLEPTRSRKSRGREENPRVCDKGCCAVETLAHIVQSCPATWGIRIRRHNTVLALLGQCLSRKGWKMKLEPQIRYRSTTLKPDLVAARDGRALVVDVQVVADSTEHTLHAAHCTKLQKYDVPEVLEYAREVAGSPTAPVVVTSCTINWRGCWSESLAGALRQAGLSWAQVRLLALRALQGTASCYIGFCRTAGACS

SEQ ID NO: 15 - protein, 1221 aa, synthetic construct
MKRLDHQNRPVARFSCAGQNDELVHRARKKCSRCLGLTSLFSVHLVTKMNLMNMGSPPGDALQVKSEGLGTASGIGNGIDGCCPVCGKTYKGSRGMRIHWRAVHPESFHSRETTRLESAERKTKCRWSQEETSALALHESRIVRRGCPTGRRDLNEQLARLMSGRTSEAIKSHRRAESYRELVAAYERMGSVPRTRELPRETVEKADASRRVLRPRAPRGRDEVEQVSSDAVTRVAEACSPGPHPGPYGGNKREWDDHASTQPATRVAEAGHLGPYPSVGEESSGEGADRTQRVRATLVAELDPEWLPSGSDSEPGSDREQQTEYLVTMGELPSTRDVGTPARGRHPSYTEVNGDEFDWQYPLIEAILEQALSADIDPILVQVAIENSPENSDSLQRLIDHDLMGMFPPIEKPSLRGGPGPPRRAAQTARAKRRESYARIQSLYKSSRSNCARTVLNGHWRTAPPKLSMQTQMAFWRPLLETPSKQETRLPPEGVRPQWAMVCPITLEEVARHLGNMKDGAAGPDNCGRKDLRKLSAVSLACRFNLWLLTGKAPEAFKHGITVLIPKSQDGHEPKDFRPITMGSILCRLYHKILAERVERHYQISGSQKAFRKGDGLAENMYILTNVIEDRKARSQATNIAFLDVSKAFDSVSHESILLAAASAGIPHPLVRYVRSVYTGSTTRLRVDGELGPDIRVRRGVRQGDPLSPVLFNSVVDLALRQIDQEIGVSVATEKLSCLAFADDLVLLATTPRGLQTQFERIELALGESGLDLNAAKSATIRIDVSGKSKRWICNPTAFLLAKDGQVIKAIKVTEDYRYLGNAIGTSRTKGSTVQELQRGIAELSRAPLKPQQRLFILRKNLIPSLYHTAVLGRMYKKSLKFLDQIVRAAVRSWLRLPNDTPLGLFHAHYSDGGLDIPPLLLTVPLLRTKRMGRLVSSQDPIARAVAQLPIFERERKRWSAPLAAYGVSIRDGTGVRKAMGVGLHMSVDGRGLTGSRETGFVNKWMVSGDALMSGHSFVNCVRLKCNLPYTRARAARGRPDKPVACDACRSPETLAHILQSCPRTSKPRVDRHDRANKYLTEVVRRSGFATRVEPAIPTPAGIRYPDLVVWKDGLCVVVDTTIVADHKNPDDAHERKVRYYDQPAIRGWCESISGVAADEVKFSACVLTWRGVPSVRSVRELRTLGVTKSNWLLLSVKALEGGIACYSHFTNATVSFCYLP

SEQ ID NO: 16 - protein, 1023 aa, synthetic construct
MGKDNPKAALWKEQENKAREAYFSLLTTIGRRKKDMAEAKAIKYRGKSNTHFLRPSFMSRKRSSITSMLVDGSDDKDAKRTTDDKVWKDNFNEFYKELYSPKEIEVDVLKDILDKTDISLPPRLLSKLRRRAKTSEIEKIIDTLPAGKAPGPDSLPYGIWGILRDTSPVAFCNLFNACMDRGKIVNSARKANIVLLPKEPDSFACGMYRPISLTNTDYKIIMRVWANRLGPMLNSKIGGHQLGFIPGRDGRENIINEQFLIDYYQHKGRAGAVVFLDLQKAFDRVSHEALMTIMRHHGWPEEFVGFVENVYTNNTAKLIVNGELNEESFNVASGTRQGCPLSPLLFTLIAEMLCQPIINDPEFKGMKVDDGDRKALSAYADDIAINNSCREDIDIMNAHLERFERATGMRVNKKKSEAVLVGGWIRFPPPELLFPCVRKVKYLGCPVGRLTDIDYTCTWEAMEDKLDATFRRWNRAATAPKDRMLLAKTMALSKLWYMASVIPWSIQSLRRIQKTTIRYIWGFKMHKVSMSQLQLPKKNLGLNMWSLVAKVRALNARWGLYYLTNKLSPDLHNLMHSVYNNTRIGRTDTDREPLQASGSLPGTMIKKITGSRIMSYLMDNWSRIVTRCPIFKIGDEVKFAYEDGSIWDGVGTITTEISDSFKYVVEWEENPRQNPKVIANTGTCKAMALYSNDPTAITDTHNTMGIEIDHRVMVLLRTALKKVSVKSTKHGPAFDKVEVNKHLYNGQMLGMGQIDIGKGPKVNKFVERFTEPKLLAAVRANWSSSASSAVQSFRWLLMSHALPVGSRPTPTSACVFSGEEETIEHLFYECKFAEAIWDEVYSNWLKMIQLANFELKVCTPVIMPRRNFWNTVFRGGKHMSFRNQWTIVQGIVTYHIWRTRCAAYYNNKIPPPPKAEVPFIWQHVFLTLQAEADALRDIKWWWIKRSLAMNPHQREVIQDKVLPGIEKDLATLEALQSTLTHTSQRRVSDREDGLSNTVLPYRNRYSNPYWYLSIVNPTLLEKK

SEQ ID NO: 17 - protein, 1031 aa, synthetic construct
MAACLDRPFLPLHAAFAEPRYTTLPPCSMRIATWNVRTMNAESKPEQLAHRLQQYDIDICCITEVRWPYSGIKDVGGWKLAFSGRDDGQLRQGVGVMLSPRAAAAYIDSQPISEGVLLVKLRLKSSTLCVICAYAPTNDYPEDQKDAFFVELQHAVDRVAARNTLVLAGDFNAQVGAEDPQQWHGCLGKFALKRDTLRTSGMAIRLLDFCVTNDLVLRNTFFDHKNIHLATWTGPGDRNANQIDFMVMRRAQARAMLNCRVHRGAELETDHYLLVSSCRLQFSQPRATQRQRKSGYGSELLHDAAVQSTFASMISNESRHFYDMMDMPDTAPEELWQQYKSGMQRCADAVLRKETEPRTPWMSAKTWDHVQRKQDSYKALKHAKSEHEKVIFRQRYRQALNECRKSVKADKRAYWRAKAVALEADFAANRVHTAYKRVGLRDELDRVQSLSAGKLRRIDGTHTSSAKEKADIRKDHFQELLNCHRPVQPLVHKWVQAQQQHILQDLPSDEVPTLPEVESAVNALKNYKAAGVCGISPEMIKYGGRDGLKMLHMLISTVWQKGVVPDDWKRALIVPLFKKGDPTNIDNYRGISLLSLPGKVLAIVLKNRLQQWAEALLMEGQCGFRKGRSCNDAIFSLNGLCELTSKAGKQLHACFIDLSKAYDSVDRPLAWELFQSLGLPPKMLGLIKDLHNNTTCALQTDKDKQDSWFQVSTGFKQGDVNAPLFFNIFLDSICRYIEAKAGELGFNLAYNIDGHLTGRRKPNGSMPCWILLYADDMVIFEKNRERMQAVLATVYQALQDWGMQMSIPKTKYLCYNSAEHCAQPLEIAQHEIEQVSKFKYLGSMQTSDLSVRAEVNNRLASAANAWLKLSKLHVWDDVCISTGIKCTLYKVIVQSTLLYGSETWAFPKQQMHRLDVFQMKCLRKIYKVSLKDRVKNDIILGRCNVAKISNIVSHRRLRWLGHLARMPDERLPKRVLFGYMDGSGVRGKSQKQWVDYVREDLHFAGLSFTWWRKSQDRAVWRAAIECLLQRT

SEQ ID NO: 18 - protein, 1032 aa, synthetic construct
MSNPNKVKKITHRFWAHKFKRKGKGKTKTNKMSNLPRPNFSIEELKKVLARKKLDTAPGPDAIPYSAYRTLNEDNLSAILEEINSKINDTPEEWLEALQWNIFKEGKKEELNNYRPIALCNTIYKIQTLLIKERMEEITTEENLIHPSQHGFTKHRTTSHNIIALKTIIHKDKLEQRETHLLFLDIAGAYDSVPHEALWCTLAKNPSIQPYAMIIQQMYSKATTQIITSVGLTDKIQIERGVRQGDPLSPLLFNLFINEVITKVYKQHRGWRTKNQNYPTLAFADDLVLCANTRRDLQTITKKVIRFLRKNHMNINTKKTIYTSSNRRRRSIHLQHNTKIKEVKKGKAVRYLGAYLSLDQPDKKESDTRIAELWKRVNLITSKKLYPHIMAEAVNALAYSKIVYSFGHTKYKRKALKEIDKKVAHLIRTKTGAYPFHTDKVHAKWREGGWGLLSLHDLYTRMMTGTLFDRILNRPNTISKKIICEALEEIGESNKEIPGSITYQALHAPPTIKQAWKIAREEGLIPINTTLNLLHPETILSAHPLVIDELNQKGISDVTTIKTNLPQSVANYLLGPINNLLPFMRRDQEMQPPQNTIQIENSRVVWTDGSLKKGENSGTAGIFYDLGNPGNKTIHIPHCNSSFEAEAIAIHAALRECPQEENIRIITDSLSVIQAINSEDSPSYVIEGIKKRIQERKGKQSRTEIIHIYSHIKKKKKKSQVWEEKIRDQEIELFPHFRQYRWGNKKADKLTNQEASKQKGIPPYAPEFMIFNKQKLKWEPLRVKDTLKREQRSKIITTTNERDQGRHPSLQQTNRSLSEIALKNPTIQASEANFLIKARSYCLPIPDRKNKPAICPKCGGLETHQHLLLECPNLEETKKQIVKKMKETLTKMAIPHIVANEWFNNEIPTYMWALGYIPKKWAQRMKRMIGGKPLTSAIAIATRITSKLTLKSFKENRNQIRRPNRRANQRNTNPTRNDTDNASDNDNTQVANATNVNVALQIDIRQAILDALEILPDPIIPTTPSLHRTTPQ

SEQ ID NO: 19 - protein, 991 aa, synthetic construct
MASTNLRITTYNCKHFHDSGENFTFIDTLMCDTNFLFLQELCLYENEFEKLLNLSNNCDFTATSAMDEKVHRIGRPFGGTAIIWNSSITGHINKVECDNNRICGLLYIMNNVTMMLLNIYMPCDKYTDDFEFIDVVNTISQLLHKHNPSHVVIGGDMNVDFIRNSPNTRVLSDFITDFNLYTCIDLPDSNVPYTFINHNNNTSRIDHFFVCESLKDAISDCNIVDNHLFSDHVPLNICFNLDVTYIAEVERPFTSKQAWYKATDFDIEKYKKRLDGLLENIIINDSMLYCSDYNCIDHKEELCELYNTVINTCITASDHIPTTSNRIKVKPGWNDNVKQLKEDALSWHHFWKINNRPRVGYVAEMHRISRARYHRAIRHIDRNASKIKSEKIAEAMLSNNSRDMWSEVKKMKGRNSKLTCSIDDCSDSNDIANIFSSKYMELYNSVPYDVDEMKKIESRIMDRIGDCSDDDYNISVRDVIDAVARLKHSKSDGSEGLFSDHFIYGTNRLFVILSLLYSLFLSHGFSPDSMILGTMIPIPKNKKKSLSHSSNYRAIALSSIFSKIFDWIILIKEHSSLCSSDLQFGFKKDTSTTQCSYSMLETIDYYNFNRSNVYVLMLDASKAFDRVNYCKLFNELLKRDISPLVLRLLLYMYTSQCLRVKWGHTLSDCFTVKNGVKQGGVLSPILFAIYTDGMLQKLESTGVGCHMGSHFTGALAYADDLTLLSPSISGLKILIEVCEQYARDFDILFNGNKSQLLFYKGRGCVSCYKDIVVNEQCVKYSNSAVHLGHTISPDDKDCILRNAKANFWKKFNIFMSDFGNLSCHVKSKLFQQYCCSMYGSPLWSLRGSAVQSLCVAWRKALRSLWRVSPRTHCDLITALSFQIPLHSNLAKIFAKFIIKCLCSKNRIVNIISHIAIRNPISCAGNNYRDLLDRNSEVDVKTLLLNWKERADTLENLVRTLHELIEIRDGLKECIGLTFDEITILITDICIH

SEQ ID NO: 20 - protein, 1094 aa, synthetic construct
MVTIYTEFKTDPGAGARVVALRVDAGAKAGYVILRSEGVHGHGYSGSGSRDRALSAAGKIDEPMETLDRKSSFRLPFKILIFESGRREMDGELSPSLDFVNRALDVQESREEEALTLGSEEPTEPLSNGSVYMPASSTERGIADLAEDGQTGKLLIPMPLRTVACPCNQVFCNVYEFEIHMERAHMGIDVKYTCDLCGKHCLRVHGAKIHRSLCRGNTIRPVIPRPWKCEACEEAFRSKSGLSQHKRHRHPALRNLERKAKYVKEPGQAKPLFKATKLWSIEETKRLLELENEFQGNKNINKLIAAQLAGKSNKLVSDRRRTVHKAKTNISQDKGVTAGRNEDRVTGPGMAVSETVTDPEAFWDFVTGARNSGVEGESHQKTLQVLVDLLQEGNVERACSQVSEILADITPVTKPQSKSKKGQGPKNRRKSQAKAEAYRHAQQLFETNKKSLVAELLEGAESTKCPLSVETVYEAYKARFETESPEVDMSHFPPPVNGMDCDNILKPITGEEVYKAVRKTRPDSASGPDKIDVRSIRKWDPRGIKLAAVFNIFLLTGKVPDAVRPNRSILLYKGGETTQVGNWRPLTIGCMVLRLYTKVLAARFMFATPISPCQRGFVSGGSCNENVHLVEGLVRDAKRRNKPIGVCFLDLAKAFDTVSHKHVLAGLTRFGASKHVTRIVEDLYRGASTRFTIPDGTTGEIEMKRGVKQGDPLSPVLFNIALDPLFCLVEKAGVPYELEDGTPVSVAGYADDTMVVSNNKNDLQANINLVEEFCRAAKLKLNAKKSYAYTIRPIAKTYVVNCGDQLRIEAEAITWIEPGDTAKYLGVEQSPWIRKVKDNPTEDLKSWCSKLGRAPLKGRQKLLLLSRHVLPKLKYRLANSDPSKEVLAGLDSVSREYTKRWMNLPACVSSAFLHCSVQDGGVGLPSLATEVPLDKIGSMSRLIGSQDGHVKRLAKAIGIEEQLETTCRRWEIRRPLNKMRCVVNEIRKRRRVEWENLGSQGPRGPYWRRCRASNGWMRRDVLSEGEHTVALQLRTNTYPTREAMSRGRKGTNVMCRRCGQSVETLGHITRQCLAVKCNRIKRHNKVCGILVSAT

SEQ ID NO: 21 - protein, 846 aa, synthetic construct
MTGEDPQECAKCNYNMIDTKQAVDHCARKHHGMSVQWKCRKCERDWSNIRSIAAHYRHCTGRPPSPVATTATSHVCDQCERAFTGLAGLQLHRKRKHPAAYNESLPRPTGKNRLLGADELTRLAGVELDLGTSKRINLVCHDHFQHRSVDAIATIRKSKRYKDILKVVVETRSLVDEQEAGEGAQAPEPFINIVEAQLRTRFDELEGDSSPAVRDTLAYTRTSLAEGNATIGLDLLSEEVYRPRKAPDSTSNPRKRGPDFAPTTRSQKRRQLYKQIQSLYQRNRKQAVGVILDGDPIQTVFPDVDRADEVFRGRFARPSPPDDKVFNLVPGDTMNMGYITSEEISKCRSAMKKKNAPGPDKEVTMDLVLGLELTVLELIFNTWFALGQVPTAFKEARTILLPKSGDATDPNNWRPITICSLIGRLYAKLLAGRLSKCANLSERQKAFVPVDGCGENTALLSSVIAHAHKVKTQVHIAFLDLAKAFDTVPHTSILRALRRKALPEHFIAIVENLYSDANTSISVGDKSTPSIPMTSGVKQGCPLSPVLFNLVLDELIQNIGTIDGLSVGHSKLAILAFADDLVLISGTKDGLASNLRTCEELFNARSMKLNARKSMTLSLVRAHKRKTMLTDETPHWKVYGEFLPAVKHTEEVKYLGVRYTAGGRPMAKLPKLNDWLQKLKSAPLKPQQRIQIVRSTITSRVIHTLRLCRVHAKLLKNLDRKIRTFIKGVLHLPSGTSTDWFYIPIRMGGLGLQEFMSLIPAAKLKLIDGMKKSQDPTVVDAIRQEHWLKEERWCRAVSSLYGNKEQADRGRVERHISSHTGQTQIGFARLPGQCNWLEGGGKHDRS

SEQ ID NO: 22 - protein, 1019 aa, synthetic construct
MKSRQTKTALSTPQLLNGQRVLGISGPRTASTTSWCAGRGGSSKGTAHRTGDGDQRRSGSRGEQVLLRVASLNVGSMTGKGAELVNLMSERRISIACVQETRWKGNSCRELGNGYKLLYAGEVSGRSGVGVVVKGELKESIVDVKRVNSRLMLVKLVWKGIVLNVVSAYAPQAGLGEEEKQQFWRDFDGLIFGVEKEERLMIGGDLNGHVGARAGCYREVHGNEGFGILNKEGEGILETALAHNLFIVNTKFKKKQEHLITYKSQMGISQIDYFLVRRDDVMECKDCKVLPGETLEGHHRILILDMRIKVKEDKKKRVLAEGIKWKKMQEKGGTLKQKLLTEVEWEFDSSAEGMWKKTSVVLKRCCREVLGVYKVGTRYIEKETWWWNEDVSKVVKNKKKAYKKWQESKSDEDYEEYKKTKNIAKRKVAQVKSDKFKDMYNRLETREGEKDVYRLAKERAKKKRDIDSVRCVKDEGGEVLVKNEEIRNRWGRYFSSVMNEGDSGSHCDTSGLGEFEPAEQGVEEITSVEVEKALQKMKRGKAVGPDEIPIEVWRLLGESGIYWLTRLFNKMLKGDTMPEEWRMSYVTPLYKGKGDVQDCNNYRGIKLLSHTMKLWERVIEARLRRFTGINENQFGFMPGRSTTEPIFIVRQLMEKFRGARKSMFVVFVDLEKAYDRVPRRVLWDVLMRKGVGKRYIDLIRDMYRESKTCVKTVGGLSDGFGVGVGVHQGSSLSPYLFVLVMDELLKGNVPDVPWCMLFADDMILIGETVEEVEEKLGRVMRALESNGMKVNRSKTEYVFCDWSENGLAKEVTVQDWRVGRVGQYKYLGSIVEEDGGIDKETKARIQAGWNKLREVSGVLFDKRIARRLRGKVYATVVRPVMLYGAECWPVTKIQEHTFGVAEMRMLRSMYGVTIKDRVENEYIREGLGVENIKQKMRESRLRWYGHVSRKGEEEVVSRVRDLRVGGKRRRGRPKMSWDSVLAKDMEYCGLRHDMVHDKTEWRFAIKMPTLAKLGQRQGR

SEQ ID NO: 23 - protein, 955 aa, synthetic construct
MAANLVTISYNLHGYNQGCPGINELILKLRPDIFMVQEHWLSPDNLSKLDNISDCYFVFGSSAMLDCVSSGPLVGRPFGGTAFLINKKHVSATSNVESSDRFTVIRIYNWLLINVYLPCVGTPHRDELYSDILLQLQNIISANSDCSCLIGGDFNVDLDGNSNISLLVNEFMCHNNMHRCDVLFPVSNRNTFMNEATNTGSAIDYMLSSTSDKTIAFNILDLDINLSDHSPIMAVCALDMSFLPLSTQCESCSPDDVTHLRWDHAPLCMYYEHTRLLLQPVLTNLDALLESSDSADDVFCVGSADQIYCNVVNILCESANLFVPKHKKNFYRFWWSQELDMLKSKAIESSRAWKGAGKPKHGSIFSQYKQDKLLYKKRIREECFNETKSYTNDLHDALLCKSGQAFWKTWKSKFESKSTNVLQVDGTADSGIITDKFGKYFEANCSPFSPARNEEFKKKYTELRSNYSGSPITDDQVFDVELISRLVSNMDKGKAAGLDELSSEHLKFSHPILICILTKLFNLFIAKGHIPTSFGSSYTVPIPKCDGRTRALSVDDFRGISISPVLSKLFELAILDRFSTYFTTSDHQFGFKKHLSCRNAIYCVRNVVESFVSNGSTVNVCALDLSKAFDRMNHYALFIKLIERNFPTKLLNVLETWFCASITCVKWGRNVSSFFSLHAGVRQGGVLSPILFSVFIDDIVTKVKAANVGCYMSTICASIFLYADDVLLVAPSVAGLQSLLNVCENELINLDMRINVKKSMCVRFGQRFDAPCVELVSIHGGSLKWVSSCRYLGVYFVSGRTFKCCFHSAKSQFYRAFNSLFSRVGRAASEEIILVLINAKCMPILMYALEACPLLSRDKQSFQFTITRLFMKLFRTGSPAVVEECERHFNFLPFKQQLDIRTAKFLQSFMASENSLCLLFESNARLQLSSIYSNYGHTIRTVCQLVNKIHEQYFC

SEQ ID NO: 24 - protein, 917 aa, synthetic construct
MGSSNFTGARLTVISYNLHGLNQGLTGIRELMTQINPDVIMVQEHWLTSDNLFKLSDISDNYFVFGSSAMDSRISAGPLVGRPFGGTAILIKNDFVNVTVSVATCERFTAIKLDKWLLVNVYLPCSGTDHRLLIYTDVLCEVQALISTHSDCECLVGGDFNSDLKDSKSHAINHMINDFILTNNLCRCDLVFPVAIKHTYINESLNCSSTIDYMLTSNPGCTVGFNILDLDLNLSDHLPIMAILALNAHIPSAASMDVSVDVTHLRWDHAQLHEYYDLTRLGLDPVLCELTVLINNFRCTPDTAVYGNIDALYNRVVNVLNQCADHCVPKQRKNFFKFWWSQELAELKEKAIASCRMWKDAGRPRNGPINAKYRQDKLLYKKRIRKERAEETSSFTNDLHDALLYKCGSDFWKVWNSKFENKSSKIIQVGGTADSNVITSNFAKHFEQVCQPFSSARNAEIKAQYDDIRANYNTIPVFSDIEIFDSELLGSLLAKMKNGKAAGLDGITSEHLKNCHPSVVVILCKLFNLFIATGHIPSSFAASYTVPIPKCDGRSKSLDVDDFRGISISPVISKLFELCVLERYSDYFDTSDHQFGFKKNLSCCHVIYSVRTVIENFISNGSTVNLCALDLSKAFDRMNHYALFIKLMERKFPVEVLKVLEQWFSMSITCVKWGGQMSNFFSLVAGVRQGGVLSPVLFSIFIDGIVNKAKSANVGCYLSNICVSIYLYADDILLIAPTVTGLQTLLTMCEQELFELDMKLNVAKSVCIRFGEQFDAVCSDILSVQGGKLQWVYNCRYLGVYFTSGRVFRCCFHNAKCSFFRAFNAIFSKVGRFASEHVILSLLRTKCLPILLYGIEACPMLKRDKHSLDFTLTRIFMKLFCTATPAIVAECHVQFNFLPLKYQVDIRTASFLFRFIS

SEQ ID NO: 25 - protein, 973 aa, synthetic construct
MMAALSNSTHLIGNSNCTGARLVVISYNLHGLNQGMTGIRELIRHVNPDVIMVQEHWLTSDNLFKLSDISDKYFVFGSSAMDARVSAGPLVGRPFGGTAMLIKNSFVNITVGIATCERFTAIKLANWLLVNVYLPCSGTDQRLLIYSDVLCEVQSLITAHSDCDYLVGGDFNSDLTDAKSHASNHMINDFIVTNNLCRCDVVFPVATKYTYINESLDCSSTIDYMLTSNCDSTIAFNIVDLDLNLSDHLPILVVLALNADLSNATCNANPSVDVTHLRWDHAQINEYYDLTRLGLDPVLCELTVVINNLHCAPESMVSDQIDALYERVVNVLSQCADQCVPKQIKNFFKFWWSQELAELKEKAIASCRLWKEAGRPRNGPINVKYRQDKLLYKKRIREERAEESSSFTNDLHEALLRKSGSDFWKVWNSKFENKSSKIIQVGGTADSNVIVNSFAKHFEEVCQPFTAARNADLKAQYDDVRVNYSTPPVFSDAEIFDAELVGNLLVKMKNGKAAGLDGITSEHLKHSHPSVVVILCKLFNLFIATGHIPISFAASYTVPIPKCDGRSKSLEVNDFRGISISPVISKLFELCVLERYRDYFDTSDHQFGFKKTLSCSHVIYSVRTVIENFISNGSTVNLCALDLSKAFDRMNHYALFIKLIKRKFPVEILQILEHWFCGSKTCVRWGGQVSYFFAMVAGVRQGGVLSPVLFSIFIDDIVNKVKLANVGCYLSNICVSIFLYADDILLIAPTVTGLQTLLTVCEQELLELDMKLNVDKSVCIRFGDQFDASCTDIMSVQGGRLLWVDSCRYLGVYFTSGRVFRCCFHNAKCSFFRSFNAIFSKVGRFASEQVILSLLRTKCLPILLYGLEACPVLKSDKHSLNFTLTRLFMKLFRTGSPAVVAECQLQFNFLPLQYQVDIRTAKFLFRFLNSANSLCILLSVHAKAQLTSILSSYGEDVSSIYDLHVAISDILVA

SEQ ID NO: 26 - protein, 968 aa, synthetic construct
MASEQINLRDCDSAEKLIVISYNLHGLNQGRPGITELISLLSPDAIMIQEHWLTPDNMYKLDQLSDNYLVFGSSAMNDCVLSGPLIGRPFGGTAIIIKKSLASATKNIISSDRYNVVKIANWLLFNVYMPCVGTDYREYLYVEILSEFDSLLAANPNCSCLVGGDFNTCLDNPVNVSVTINTFIANNMLHRCDILFPSNNKFTFFNESTHSGTAIDYMLASDPNDIIAFNVLDMDINLSDHHPIMAVCACPKLSIDPSSCQTNLPEIQHFRWDHAQLDNYYEHTRRLLQPVYDELNVLACCHVSLDAMIVADKIDSIYNRFVTALCVSAEKFIPKHRKNFYKFWWSQELDALKEKSIASCRKWKEAGKPRNGPIQAQYKKDKLLYKKCIKEEQAAETCSFTNDLHDALLCKSNQDFWKTWRSKFSNNSNNIIQVDGIADGAAIANNFANFFESNSKPFSDSRNAELKAQYTELRADYCGCPVTDNELFDVELIGKLITEMKNNKAAGLDELTCEHLKFSHPIAICILTQLFNLFIALSHIPSSFGASYTVPIPKCDGRTRAMSVDDFRGISISPVISKVFEMAVLDRFAPYFRTSDHQFGFKRNIGCREAIYSVRNVIETFISNGSTINVCTLDLSKAFDRMNHYALLIKLIERKLPFQLLIVLENWFLISITCVKWNGHVSHFFRLLLGVRQGGVLSPLLFAIFVDDIVIRVKSTHAGCYISLVCCCIFLYADDILLVSPTVSGLQILLNACENELTELDMKINVKKSMCIRFGKRFDVHCAELVSVQGGPILWVDSCRYLGVYFLSGRSFRCSLDDAKSRFFRAFNAIYSKVGHFASETVILNLIRTKCLPILLYATEACPLLSRQKHSLEFTVTRIFMRIFHTGSMDIVKQCQCNFGFLSVSYQLSVRTARFLQKLVASENSLCLLFSRTASDQLAKIFSFFDEDIKTACQLNNFLYELLSVSFN

SEQ ID NO: 27 - protein, 968 aa, synthetic construct
MASEQINLRDCDSAEKLIVISYNLHGLNQGRPGITELISLLSPDAIMIQEHWLTPDNMYKLDQLSDNYLVFGSSAMNDCVLSGPLIGRPFGGTAIIIKKSLASVTKNIISSDRYNVVKIANWLLFNVYMPCVGTDYREYLYVEILSEFDSLLAANPNCSCLVGGDFNTCLDNPVNVSVTINTFIANNMLHRCDILFPSSNKFTFFNESTHSGTAIDYMLASDPNDIIAFNVLDMDINLSDHHPIMAVCACTKLSIDPSSCQTNLPEIQHFRWDHAQLDNYYEHTRRLLQPVYDELNVLACCHVSLDAMIVADKIDSIYNRFVTALCVSAEKFIPKHRKNFYKFWWSQELDALKEKSIASCRKWKEAGKPRNGPIQAQYKKDKLLYKKCIKEEQAAETCSFTNDLHDALLCKSNQDFWKTWRSKFSNNSNNIIQVDGIADGAAIANNFANFFESNSKPFSDSRNAELKAQYTELRADYCGCPVTDNELFDVELIGKLITEMKNNKAAGLDELTCEHLKFSHPIAICILTQLFNLFIALSHIPSSFGASYTVPIPKCDGRTRAMSVDDFRGISISPVISKVFEMAVLDRFAPYFRTSDHQFGFKRNIGCREAIYSVRNVIETFISNGSTINVCTLDLSKAFDRMNHYALLIKLIERKLPFQLLIVLENWFLISITCVKWNGHVSHFFRLLLGVRQGGVLSPLLFAIFVDDIVIRVKSTHAGCYISLVCCCIFLYADDILLVSPTVSGLQILLNACENELTELDMKINVKKSMCIRFGKRFDVHCAELVSVQGGPILWVDSCRYLGVYFLSGRSFRCSLDDAKSRFFRAFNAIYSKVGHFASETVILNLIRTKCLPILLYATEACPLLSRQKHSLEFTVTRIFMRIFHTGSMDIVKQCQCNFGFLSVSYQLSVRTARFLQKLVASENSLCLLFSRTASDQLAKIFSFFDEDIKTACQLNNFLYELLSVSFN

SEQ ID NO: 28 - protein, 974 aa, synthetic construct
MATKYSNCASDNTCNTPVHRLVVVSYNLHGYNQGCPGILELMSKITPDVIMVQEHWLTPDNLHKLNDLSNDYFVFGSSAMSERVASGPLYGRPFGDTAIFINNKYASVTTNLVSRDRYTAIKIANFMLITVYMPSVGTAQRDFLCSELLAELDAVLSSNSNSNSNCQFLIGGDFNTNLDSNAKVSLAINEFISNNSIYRCDEIFDVADSYTFCNETAHCFSTIDYMLTSCAQDIIAFNVVDMDINLSDHNPILSVCSCCIDTRSVNKNEKSADLYAEFFRWDHAPVDKYYDQTRVLMQPVLDEISSLVINSAYMDKESIAIASDSIYDNLVDAMRSSANLFIPKHRKNFFKFWWSQELDELKEKAIVSCREWKSAGKPKSGVTFQQYLKDKALYKKSIRYEQQREKSCYTNDLHEALLHKNGQDFWKVWKSKFEIGSTNTIVDGLADSAAIANKFAQHLESNCRPFNSERSAALKIQYIDQRAQYCGTPITDCQWFDVELIDRLTREMKNGKAAGLDEIFCEHLKLSHPIVVCILSKLFNLFLSTGHIPASFGVSYTVPIPKCDGRTRALTVDDFRGISISPVISKLFEMAVLDRFSHYFVTSDYQFGFKKHLSCSNAIFCVRNVIENFVSRGTTVNVCTLDLSKAFDRMNHYALLVKLMSRKIPDLLLCIFELWFSISVTCVKWDNHFSHFFLLIVGVRQGGVLSPVLFAIFIDSIVDKVKSTNVGCYISLICCCIFLYADDIILIAPSIHALQTLLNACEDELFVLDMCVNVKKSACIRFGTRHDAQCCEIISSFGGSIKWVESCRYLGVFLVSGRNYSCSFHDAKSRFFRAFNAVFGKIGRIASEEVVLSLLKAKCLPILLFATEACPLLSRQKTSFDFTLTRIFMKLFNTGSAVIAKECQNLFNFLPIRMQLSIRTARFLQKFAACENNLCSLFADIAVKQLNVLFSEYNVKTACQLANAIYRKLSETLN

SEQ ID NO: 29 - protein, 973 aa, synthetic construct
MMAALSNSTHLIGNSNCTGARLVVISYNLHGLNQGMTGIRELIRHVNPDVIMVQEHWLTSDNLFKLSDISDKYFVFGSSAMDARVSAGPLVGRPFGGTAMLIKNSFVNITVGIATCERFTAIKLANWLLVNVYLPCSGTDQRLLIYSDVLCEVQSLISAHSDCDYLVGGDFNSDLTDAKSHASNHMINDFIVTNNLCRCDVVFPVATKYTYINESLDCSSTIDYMLTSNCDSTIAFNIVDLDLNLSDHLPILVVLALNADLSNATCNANPSVDVTHLRWDHAQINEYYDLTRLGLDPVLCEVTVVINNFHCAPESMVADQIDALYERVVNVLSQCADQCVPKQRKNFFKFWWSQELAELKEKAIASCRLWKEAGRPRNGPINVKYRQDKLLYKKRIREERAEESSSFTNDLHEALLRKSGSDFWKVWNSKFENKSSKIIQVGGTADSNVIVNNFAKHFEEVCQPFTAARNADLKAQYDDVRANYSTPPVFSDAEIFDAELVGNLLVKMKNGKAAGLDGITSEHLKHSHPSVVVILCKLFNLFIATGHIPISFAASYTVPIPKCDGRSKSLEVNDFRGISISPVISKLFELCVLERYRDYFDTSDHQFGFKKTLSCSHVIYSVRTVIENFISNGSTVNLCALDLSKAFDRMNHYALFIKLIKRKFPVEILQILEHWFCGSKTCVRWGGQVSYFFAMVAGVRQGGVLSPVLFSIFIDDIVNKVKLANVGCYLSNSCVSIFLYADDILLIAPTVTGLQTLLTVCEQELLELDMKLNVDKSVCIRFGDQFDASCTDIMSVQGGRLLWVDSCRYLGVYFTSGRVFRCCFHNAKCSFFRSFNAIFSKVGRFASEQVILSLLRTKCLPILLYGLEACPVLKSDKHSLNFTLTRLFMKLFRTGSPAVVAECQLQFNFLPLQYQVDIRTAKFLFRFLNSANSLCILLSVHAKAQLTSILSSYGEDVSSIYDLHVAISDILVA

SEQ ID NO: 30 - DNA, 1827 bp, synthetic construct
  source 1..1827: mol_type = other DNA
atggactacaaagacgatgacgacaagtacccctatgatgtacctgattatgctgccagcaatttcacacagttcgtccttgtagacaacggcggcaccggggatgttacagtggccccgagcaatttcgcaaacggcgtagccgagtggatctcctctaatagcagaagccaggcttataaggttacatgctctgtaaggcagtcttccgcacaaaatagaaagtacacaatcaaggtcgaagtgcccaaggttgctacacagaccgttggtggagaggagttgccagtggctgggtggcgctcctacctgaatatggagttaacaatccccattttcgctaccaattcagactgtgaactcattgtcaaagctatgcaaggtcttcttaaggatggtaacccaattccaagtgcaattgctgctaattcaggcatttattctggcggcagcagcggcggctcaagcggaagtgaaacacctggaacttccgaaagcgctacgcctgaatcttctggtggatcttctggcggatcttccgcatgcatggacacctcaagccttatggaacagatattgagtaaagaaaatctcaacgctgcctacctccaagttgtgagaaataagggtgctgccggagtagacgggatgaatgtcgaagaactgggtgcgtacctctccgagaacggcgagaacatacgagaacagcttcgcacaaggaaatacaaaccccagcccgtgagacgagtcgagatacccaagcctgatggaggggttcggaatttgggtgtacctactgtcgtggatcggtttgtacagcaagccgtggcacaggtcctcacacctatcttcgaggagcaattccacgaccatagctacggattcagaccaaaccgctgtgctcaacaagcagtcctgaaagccttagaaatgatgaatgacggccacagttggatcgttgacattgatctcgcgaaattcttcgatacggtcgaccacgacaagttgatgacgatcttcggcagaacaatcaaagatggtgacgtaatcagcgtagtgagaaaattcttggtatctggcgttatgatcgatgatgagtatgaggatacgatcgtggggaccccacagggtggaaacatatcaccactcttggccaatatcatgttaaatgagctcgataacgaactggaggctcgtggacttaacttcgtgcgatatgccgacgaccttataattatggtcggctctaaacaggccgccgatagagtgatgaagtctgtgaccagattcattgaggaaaagctcggactgaaggtgaatgctgaaaaaagcaaggtcgataagcccaagggaattaagtatctggggttcggcttctacttcgacacctttgccaaggcatacaaagctaggccccatccaaaagctgttaccaagtttaaagcccagatgaagaagctgacatgtcgaagttggggagtgagcaatgcttacaaagtgcaaaagctgaatcagctgatacgtgggtggatcaactattttaaaataggcaatatgaagagattatgccaacggctggactctaatattcgttatcggttgcgcatgtgtatctggaaacattggaaaacacctaaaaatcgtgccaagaatatgatgaagctcggactgcccgcctgggccgcctggagatcagcttatatccacggttatgctcgggtctgtcggtccagagacgtccacagaacaattacctcagagcgactcaaacaattcggcttgatgtcaatgaccgactactacaccgagcgaagcgtggcctgttga

SEQ ID NO: 31 - DNA, 1830 bp, synthetic construct
  source 1..1830: mol_type = other DNA
atggactacaaagacgatgacgacaagtacccctatgatgtacctgattatgctgccagcaatttcacacagttcgtccttgtagacaacggcggcaccggggatgttacagtggccccgagcaatttcgcaaacggcgtagccgagtggatctcctctaatagcagaagccaggcttataaggttacatgctctgtaaggcagtcttccgcacaaaatagaaagtacacaatcaaggtcgaagtgcccaaggttgctacacagaccgttggtggagaggagttgccagtggctgggtggcgctcctacctgaatatggagttaacaatccccattttcgctaccaattcagactgtgaactcattgtcaaagctatgcaaggtcttcttaaggatggtaacccaattccaagtgcaattgctgctaattcaggcatttattctggcggcagcagcggcggctcaagcggaagtgaaacacctggaacttccgaaagcgctacgcctgaatcttctggtggatcttctggcggatcttccgcatgcatggacaccagctctctcatggaacaaattttatctaaagacaacttgaacgcagcctaccttcaagtggtgcgtaacaaaggtgcagcgggagtggacggaatgacagtagaggaactgggggcatacctctctgagaacggcgagtctattcgggaacagttgcggacccgcaagtaccgaccccagccagtacggagagccgagatcagtaagccagacggtggtgtacgtaaactcggagtccctaccgttgttgatcgattcgtgcagcaagccgtggcccaggttctcacccccattttcgaggaacaattccatgatcacagttatggatttcgacccaacagatgtgcccagcaggccgtgcttaaggccctggaaatgatgaacgacggacactcttggatcgtggatatcgacctcgccaagtttttcgacaccgtggatcatgataagctgatgaccatcttcggcagaacaataaaagacggggacgtgatatctgtcgtccgcaaatttctcgtgagcggcgtgatgatcgacgatgagtatgaggacaccattgttggaactccacaaggggggaatataagccctttgttagctaatatcatgctgaatgagctcgataaagaactggaagctcgcgggttggacttcgtaaggtacgcagacgacctcattatcatggtgggatcacggcaggctgcagacagggtgatgaagtccgtgactcggttcattgaggagaggttaggcctgaaagtaaatgccgaaaagtcaaaagtagataagccaaaagggattaagtatctgggctttggattttacttcgacagcttcgccaaggcgtataaggcgcgtcctcacccgaaagcagtcgctaaattcaaagctcagatgaaaaaacttacatgtcggagttggggagtttctaactcttataaggtgcttaaattgaatcagctgattagaggctggataaactacttccggatagggagcatgatagaactttgtaaacgcttagacgaaaacattaggtttcgtctccgtatgtgtatttggaagcactggaagacccccaaaaacagagccaagctgttgatgcttctggatgtccctcgttgggccgcctataagatcgcatatagcggcaaccgatacgcgcggatcacacacaacggctgggtgcacaaagcaatatcaaataaaaggttggccgcgttcggtttgattagcatggaagattactatgccaagcgccgggtggcctgttga

SEQ ID NO: 32 - DNA, 1830 bp, synthetic construct
  source 1..1830: mol_type = other DNA
atggactacaaagacgatgacgacaagtacccctatgatgtacctgattatgctgccagcaatttcacacagttcgtccttgtagacaacggcggcaccggggatgttacagtggccccgagcaatttcgcaaacggcgtagccgagtggatctcctctaatagcagaagccaggcttataaggttacatgctctgtaaggcagtcttccgcacaaaatagaaagtacacaatcaaggtcgaagtgcccaaggttgctacacagaccgttggtggagaggagttgccagtggctgggtggcgctcctacctgaatatggagttaacaatccccattttcgctaccaattcagactgtgaactcattgtcaaagctatgcaaggtcttcttaaggatggtaacccaattccaagtgcaattgctgctaattcaggcatttattctggcggcagcagcggcggctcaagcggaagtgaaacacctggaacttccgaaagcgctacgcctgaatcttctggtggatcttctggcggatcttccgcatgcatggatacttcatctctcatggagcagatcctgtcaaaggataatttaaatgccgcctacctgcaagtcgtccgaaacaaaggggctgccggagtcgatggcatgaccgtggaggaacttggtacgtatctgagtgagaatggcgaatcaattagggaacagctcagaacccgaaaatataaaccacaaccagtacgacgagtggaaataccaaaacctgatggcgggatcaggaatttgggtgttccaacggtcgtggacaggtttgttcagcaagccgtcgctcaagtgctcaccccaatatttgaggaacagtttcacgatcactcctatggttttagaccaaatcgctgtgcccagcaggcagtcctgaaagctctggaaatgatgaatgatgggcatgactggattgttgatatcgatcttgccaaatttttcgatacggtagatcacgataagctcatgaccattttcgggcggaccattaaagatggcgacgtgatttctgtggttcggaagtttttggtgtctggcgttatgatagatgacgaatacgaggatacaatcgtcggaactccacaaggaggcaatattagcccacctttagctaatattatgcttaatgagctcgacaaagaattggaggctcgtggactggactttgtgaggtacgcagatgacctcattattatggtcggctctcgccaggccgctgaccgtgtgatgaagtctgtcacacgttttattgaagagagactgggcctgaaagttaacgccgaaaaaagcaaggtggacaagcctaagggcattaagtatttaggctttggattttatttcgattcttttgctaaagcctataaagctcggccacaccaaaaggctgtcgcaaaatttatggcacagatgaagaaactgacctgtcggagctggggcgtgtctaatgcttacaaagtccaaaagttaaatcagctgattagagggtggattaactactttaagatcggatcaatgaaaggtctctgcgagagattagattgtaacattaggtataggcttcggatgtgtatctggaagcactggaaaaccccgcagaaccgagcaaaatacctgatgcaattggggataggccggaaatacgcttggagcaccgcctatacaggtgcccggatcgcttacgtctgtcagaggggtgcaatgaatatggctataacaaaggaacgcttaacccgcttcggcttggtatcaatggcagattattatgcaaagcggcgggtaacatgctga

SEQ ID NO: 33 - DNA, 683 bp, synthetic construct
  source 1..683: mol_type = other DNA
atggtatttactctcgaagactttgtcggtgattggcggcaaactgctgggtataatttggatcaggtgctggagcaaggcggcgtcagcagcctgttccaaaacttgggagtctcagtgacgccaattcagcggatcgttctttccggggagaacggattgaaaattgatatacacgtaattattccatacgagggcctctccggtgatcagatgggtcaaattgagaagatattcaaagttgtttatcccgtagacgaccaccatttcaaagtcattctccattacggtacgttagtcattgatggcgtcacccctaatatgatagattactttggccgtccctacgagggaattgctgtgtttgatgggaagaaaattacagtgaccggaactctttggaatgggaataagatcattgatgaaagacttataaatcctgatgggagtctcctctttagagtgacaattaatggggtaacaggatggagactctgtgagcggatcttggcttagcccaaacccaaacccaaacctttagagctaggccaacatgaggattacccatgtctgcagggcctagcaagttaaaataaggctagtccgttatcaacttggccaggactgaggattacccagtctatctgcagggccaagtaaaaaaaaaaggaagggaaaagggg

SEQ ID NO: 34 - DNA, 20 bp, synthetic construct
  source 1..20: mol_type = other DNA
ggtttgggtttgggtttggg

SEQ ID NO: 35 - DNA, 20 bp, synthetic construct
  source 1..20: mol_type = other DNA
ggtttgggtttgggtttggg

SEQ ID NO: 36 - DNA, 20 bp, synthetic construct
  source 1..20: mol_type = other DNA
atcctgatgggagtctcctc

SEQ ID NO: 37 - DNA, 24 bp, synthetic construct
  source 1..24: mol_type = other DNA
gggagaatggtatttactctcgaa

SEQ ID NO: 38 - DNA, 100 bp, synthetic construct
  source 1..100: mol_type = other DNA
ggtttgggtttgggtttgggctaagccaagatccgctcacagagtctccatcctgttaccccattaattgtcactctaaagaggagactcccatcaggat

SEQ ID NO: 39 - DNA, 542 bp, synthetic construct
  source 1..542: mol_type = other DNA
ggtttgggtttgggtttgggctaagccaagatccgctcacagagtctccatcctgttaccccattaattgtcactctaaagaggagactcccatcaggatttataagtctttcatcaatgatcttattcccattccaaagagttccggtcactgtaattttcttcccatcaaacacagcaattccctcgtagggacggccaaagtaatctatcatattaggggtgacgccatcaatgactaacgtaccgtaatggagaatgactttgaaatggtggtcgtctacgggataaacaactttgaatatcttctcaatttgacccatctgatcaccggagaggccctcgtatggaataattacgtgtatatcaattttcaatccgttctccccggaaagaacgatccgctgaattggcgtcactgagactcccaagttttggaacaggctgctgacgccgccttgctccagcacctgatccaaattatacccagcagtttgccgccaatcaccgacaaagtcttcgagagtaaataccattctccc

SEQ ID NO: 40 - DNA, 1827 bp, synthetic construct
  source 1..1827: mol_type = other DNA
atggactacaaagacgatgacgacaagtacccctatgatgtacctgattatgctgccagcaatttcacacagttcgtccttgtagacaacggcggcaccggggatgttacagtggccccgagcaatttcgcaaacggcgtagccgagtggatctcctctaatagcagaagccaggcttataaggttacatgctctgtaaggcagtcttccgcacaaaatagaaagtacacaatcaaggtcgaagtgcccaaggttgctacacagaccgttggtggagaggagttgccagtggctgggtggcgctcctacctgaatatggagttaacaatccccattttcgctaccaattcagactgtgaactcattgtcaaagctatgcaaggtcttcttaaggatggtaacccaattccaagtgcaattgctgctaattcaggcatttattctggcggcagcagcggcggctcaagcggaagtgaaacacctggaacttccgaaagcgctacgcctgaatcttctggtggatcttctggcggatcttccgcatgcatggacacatcatccctcatggaacagatcctgtccaaagaaaatctgaatgaggcttatctgcaagtggtccgaaataaaggagcagcaggtgtggacggaatgagcgtggaagaactggggccttacctttctgaaaacggcgaaaatataagggagcagatgcggacacgcaaatacaaaccacagcccgttaggcgggtggagattcctaagcccgatggtggggtccgcaatctcggtgtacccacagtcgttgatagattcgtgcagcaagctgtagcccaggtgttgtcaccaatattcgaagagcaattccacgaccattcatacgggttcaggcctaatagatgtgcccagcaggcggtcctgaaggccctggagatgatgaatgacgggcacaactggattgtggatatagacctggcaaagtttttcgataccgttgaccacgacaagttaatgaccattttcgggagaactattaaagacggagacgtcataagccttgtccggaaatttctggtgagcggtgttatgatagacgatgaatacgaggacaccattgtgggcactccacagggaggaaatatctctcccctgttggctaatatcatgcttaatgagttggacaaagagttagaagccagagggcttgattttgtccggtatgccgacgatctgattattatggtgggctcaaggcaggcagcagaacgggttatgaaaagcgtgacccggttcattgagaataaacttggtctgaaggtgaatgcagagaagagcagagtagataaaccaaagggaattaagtaccttggttttggcttctacttcgacagctttgcaaaaggttacaaggcaagaccccatatgaaggccgtcgagaaattcaaagagcagatgaagaaactcacctgtcgatcttggggagtgtccaatacatacaaagtaaagaaattgaaccaactgatcagaggctggataaactatttcaaaataggctcaatgaaaaacctgtgcagaaaattggacgctcatattaggtttagactgagaatgtgcatttggaagcagtggaaaacccctaagaacagggaaaaaaacttgatcaagttagggttgcctcgttatgccgcccacgggatctcatacgccaagggatatgcccgggtctgtcgatcttggaatctgcacatctcaatatcaaaagagcggctggcaaagttcggcctgatatccatggaggattattacgcagaacgaagggttacctgctga

SEQ ID NO: 41 - DNA, 1938 bp, synthetic construct
  source 1..1938: mol_type = other DNA
atggactacaaagacgatgacgacaagtacccctatgatgtacctgattatgctgccagcaatttcacacagttcgtccttgtagacaacggcggcaccggggatgttacagtggccccgagcaatttcgcaaacggcgtagccgagtggatctcctctaatagcagaagccaggcttataaggttacatgctctgtaaggcagtcttccgcacaaaatagaaagtacacaatcaaggtcgaagtgcccaaggttgctacacagaccgttggtggagaggagttgccagtggctgggtggcgctcctacctgaatatggagttaacaatccccattttcgctaccaattcagactgtgaactcattgtcaaagctatgcaaggtcttcttaaggatggtaacccaattccaagtgcaattgctgctaattcaggcatttattctggcggcagcagcggcggctcaagcggaagtgaaacacctggaacttccgaaagcgctacgcctgaatcttctggtggatcttctggcggatcttccgcatgcatgggaaccgaaaaccgagagagctgttctcagcgcgacagtgctgaaagaaaaggctatgtgcgggcccaccgctccttcaaccgtatctggaaggaacgggattccgctgaacccgacattctcggtaaaatcctggaaaaagacaacctgaacagagcatataagcgtgtaaaagccaataagggcgcccccggggtggacgggatgaccatcgaggcaacattgccatggcttaaggagcacaatcacgagctggtggaacgcatacggaagggtaaatacacaccttctcccgtgcgacgtgtggagattcccaagccagacggaggcattcgtaaattaggcataccaacgattatcgaccggattattcagcaggcaatgctgcagcccctcctgcccatttatgagccgcttttcagtgatgacagcttcggatatcgtcccggacgaggagccaaagacgcgatttttcggattaaagagtatattgagcagggctacacgcgtgccgtggtgcttgacctgtccaaatactttgacacactgaaccacactattctcctcaatctgctgagaaggcaggtcaaggacgaaagagtgattcagatggtcaagcgttacctcaaatctggtgttatggaaaacggggtggttgccgaaactgaagaggggtctccccagggcgggaatttgtcccccctgttagcaaatgtgtacctcaacgaatttgattgggagttccacagaaggggcgtcccatgcatacgctatgctgacgacattgtgctcctggcgaaatctgagcgagccgccgagaggttactcgaatcatccgctaagtacctcgaggagactctcaagttaaaggtgaatcgcgagaaatcccggacggtttctgtatttgccatcagaaacttcaaattccttggattttgttttggtaagaacggcaagggaatttacattcgtatccatggcaaaagctggaagaaggccaaagataaattacgacagctcaccagccggagcaggtgcgggtcaatcgtgcgtacaatggagaagattaaggtctacatgaggggctggcttaactactacgggatcgcagatatgaagaataatatggaaagcttgaatggttggctgtacagaaggattagaatgtgtatctggaaacaatggaaactgcccaagacccgtaagcgaaagcttgccggactgggggtcgatagccattatgctgccaccattgcctatgatagaaagggctactggtttaacgctggcaataaggcagtgaactgggccctgagcaaagaacgtctcacaaactgggggttgtatgacctggcaactgcatatcaaagcgtccacgtgaactactga

SEQ ID NO: 42 - DNA, 1827 bp, synthetic construct
  source 1..1827: mol_type = other DNA
atggactacaaagacgatgacgacaagtacccctatgatgtacctgattatgctgccagcaatttcacacagttcgtccttgtagacaacggcggcaccggggatgttacagtggccccgagcaatttcgcaaacggcgtagccgagtggatctcctctaatagcagaagccaggcttataaggttacatgctctgtaaggcagtcttccgcacaaaatagaaagtacacaatcaaggtcgaagtgcccaaggttgctacacagaccgttggtggagaggagttgccagtggctgggtggcgctcctacctgaatatggagttaacaatccccattttcgctaccaattcagactgtgaactcattgtcaaagctatgcaaggtcttcttaaggatggtaacccaattccaagtgcaattgctgctaattcaggcatttattctggcggcagcagcggcggctcaagcggaagtgaaacacctggaacttccgaaagcgctacgcctgaatcttctggtggatcttctggcggatcttccgcatgcatgaaacttattgaaacgatcctgttttctgaaaacgtgattaaagcacagagtagagttctctctaataaaggaggcgcaggcattgacgggatgcacgtcgacgaactggcagagtatatgagggcaaattgggacggaattaaagaaagtatattggtacgtaagtataaccctgctcccgtaaggcgcgtagagattccaaaagtgaatggaggcgtaagaaagctcgggattcccacggtgcttgatcggactattcagcaggcaatagtgcaggttctttctcctatatttgaaaatgagtttcaagaaaattcttacgggtttaggccatgcaggtcctgtgagcaggctattcttaagctgctggaataccttaacgaaggctacgagtggattgtggacatagacttagaaaaattttttgataacgtcccacaagataaacttatgtcctacgtagggagagttatccgtgaccctgacaccgagagcctcatccggaaatacctgaaaagtggggttatggagaatggcatctacgaggctacggaagaagggaccccccagggcgggaatctgagtccgcttctgtccaatatcatgctgaacgagttagataaggagctggtcaatcgaggactccattacgttaggtacgcggatgattgcgtcattgcagtcgggtctgaagcctctgctaaacgagtgatgagaagtgttacgacgtggattgaacgagagttgggactcaaggttaatgcgagcaagagccatatttgccggcccacgaaacttaaatacctgggattcgggttctatcggaaccctcagaatcgccagtggcagagtaggcctcatgaaagttctgtgagcaaatttgtgagatccctgaaacggctgtgtaaaaggagctggtctgtgagtatgaccgatcggattacgcggctcaactacgtcacccgtggctggattaattatttttctatatctttcatgaagctcaagcttgagaaaatcgacgagcaccttcgaaccatgttgcgaaaagtaatctggaagcagtggaagacacctcagaagagggcctggggccttcggaaacttggggtcgacagcgctctcgcacggcggacttcattttgcggcgatagatatgagtgggtggtgaggcgcacctgcgtggcgagagctatatccaaggacgtcttcacgaggcgaggattggtgagctgtctggactactacctcattagacacagtcttaaaaccagctga

SEQ ID NO: 43 - DNA, 1947 bp, synthetic construct
  source 1..1947: mol_type = other DNA
atggactacaaagacgatgacgacaagtacccctatgatgtacctgattatgctgccagcaatttcacacagttcgtccttgtagacaacggcggcaccggggatgttacagtggccccgagcaatttcgcaaacggcgtagccgagtggatctcctctaatagcagaagccaggcttataaggttacatgctctgtaaggcagtcttccgcacaaaatagaaagtacacaatcaaggtcgaagtgcccaaggttgctacacagaccgttggtggagaggagttgccagtggctgggtggcgctcctacctgaatatggagttaacaatccccattttcgctaccaattcagactgtgaactcattgtcaaagctatgcaaggtcttcttaaggatggtaacccaattccaagtgcaattgctgctaattcaggcatttattctggcggcagcagcggcggctcaagcggaagtgaaacacctggaacttccgaaagcgctacgcctgaatcttctggtggatcttctggcggatcttccgcatgcatggagtcttatctcacacaggatagagccgaaccagaggccggctgcggtgctaacagcgtgagtgacaccgagggcgacggaaggacagttcagcacgaccttgttgaggaggtcgtatcttggtccaatctcgaggccgccttaaaacaagtggtgtctaacaggggggctcccggagtcgatggaatgaccgtggacgagcttggaccctggttggagactaattactccgagcttgcagaaaaggtccgcaacggtagatatcggcccaacccggtaagacgaaaagaaattcctaaaccaaatggcggcgtgcgagacttagggattcctaccgtcgtggacaggctgctccaacaggccgttagtcaggtgctgatgcccatatacgagcctagcttcagtgacactagctacggattccggcccggccgttccgctcatgatgctatccagaaagccaaggaatacctgagtgaagggttcggatacgtggtggatctggacctggccagattcttcgacaccctgaatcaggattacctgatgaacatcctgcgggaacgcgtgcgggacaaagcattgttggaacttataaaacgatttttgcgcagtggggtggtcttgccaaatggcctgctgagagaaaccagggagggtagccctcaaggaggccctttgtctcccctgttgtcaaacatataccttgatcgcttcgataagctgttggagtcacgcggcttgagatttgtgcgctacgccgacgattgcctggtgttcgtgaggacaccgagggcgggagaacgcgtgcgcgaatccgttacccggtatctcgagggaaccttgcgcctcagagtgaatcaggaaaagacagttgtgggacgcgccgatcaggtcaaattcttaggtttcagactgtataggcagaagaccgttggggccacggttcatgactcttcactggctcgcttccgaaaagaagtgcgtagaattacgaaacgcaaccgaggaacctcactgggctccgtcctgaccgaactgaagacgttcactcgcggatgggttggatatttccgaatagggttaagcaaatccagggcggagaagctcgatggttggattcgccagagagttaggcagtatattttcaaacagtggaagacactgcggaatcgcgcttcccagcttgtgtctctctgccctgactatttaagacctagacctggcttcacaccgtactcatgggtgcgggagtgtcgacgcgccgccttcagcagaagctattggaaggcggttaattaccccgttgttaagagggccttatccaattcttatctggctggactggggctctactccttatcagagcaactggaaaagtggaataaaggggtatga

SEQ ID NO: 44 - DNA, 1953 bp, synthetic construct
  source 1..1953: mol_type = other DNA
atggactacaaagacgatgacgacaagtacccctatgatgtacctgattatgctgccagcaatttcacacagttcgtccttgtagacaacggcggcaccggggatgttacagtggccccgagcaatttcgcaaacggcgtagccgagtggatctcctctaatagcagaagccaggcttataaggttacatgctctgtaaggcagtcttccgcacaaaatagaaagtacacaatcaaggtcgaagtgcccaaggttgctacacagaccgttggtggagaggagttgccagtggctgggtggcgctcctacctgaatatggagttaacaatccccattttcgctaccaattcagactgtgaactcattgtcaaagctatgcaaggtcttcttaaggatggtaacccaattccaagtgcaattgctgctaattcaggcatttattctggcggcagcagcggcggctcaagcggaagtgaaacacctggaacttccgaaagcgctacgcctgaatcttctggtggatcttctggcggatcttccgcatgcatgaaagacggaatgcagaagacttccgccctcgcaaacgactacccccagagaaacagaaccgaatcagagcggtatggaggggtgcagacctttatgtggatgactgaagacaacatcgtcgaggtgccatttgacaaagaacacctgctggaagtgattctttcaccagataatctgaacaaggcatataaagccgtggtccgaaataaaggctgtggaggcatcgataaaatgtcttgcgagcaattattaccgtggttgaaagccaataaagacgagctcatcagatctttgttagacggcacatatagacctaacccagtgaggcgtgttgagatcccaaaagataatggcaagatgcgacttcttggcattccgaccgtggttgaccgcatggtccagcaggccattaatcaggtcttaaccgtgatctacgaaccacagttcagcaagagatcttttggcttcagacccaggcgcggctgtccaaccgcccttagggaggtccaaaaaatcgtgaacgaagggtacaaatatgtggtggatctggatttagagaggttttttgacactgtctcccacagtaaactgatagaaatactgtctaggacactgaaggacggccgggtggtgagcctgattcaccggtatctgcggtccggcgtgatcgacaagggcctgtggcacgcatctgaggaaggtacaccccagggaggccccttatcaccactgttgtcaaacattatgcttaatgagctggacaaggagttggcgagacgaggacatccttttgttagatatgcggacgattcaatgatcttctgtaaaacaaagcgagcagcagagcgcgtgagagaatctattaccaagttcattgaaggaaagctgttccttaaagtgaataaggaaaaaacggccgtgagttacataaagggagtgagatatcttgggtattccttctacatccacaaaggcaagtgccagcttacggtgcatccaaaaagtaaagccaggatgaaatctcgcctgaaggaactcaccagtcgttcaaacgggtggggttatgaaaagcggaagcagaagttaaaagaatacatacaagggtgggtgggatactaccatctcgcagacatgaaaagactgtgtatggagaccgataaatggctgagaaggcgaatacgtatgtgtatctggaaagcttggaaaaagccgagaacaaaggtggctaatcttattaagtgcgggatcgcagaatggcaagcttaccagtggggcaacacacgtctcgcctattggaggattgcccactcacccatccttcttacggccatcagcaatgaccgtcttaggaagcagggttacatgtgcttgatggacctctatctggaatggaatccgaaatga

SEQ ID NO: 45 - DNA, 1917 bp, synthetic construct
  source 1..1917: mol_type = other DNA
atggactacaaagacgatgacgacaagtacccctatgatgtacctgattatgctgccagcaatttcacacagttcgtccttgtagacaacggcggcaccggggatgttacagtggccccgagcaatttcgcaaacggcgtagccgagtggatctcctctaatagcagaagccaggcttataaggttacatgctctgtaaggcagtcttccgcacaaaatagaaagtacacaatcaaggtcgaagtgcccaaggttgctacacagaccgttggtggagaggagttgccagtggctgggtggcgctcctacctgaatatggagttaacaatccccattttcgctaccaattcagactgtgaactcattgtcaaagctatgcaaggtcttcttaaggatggtaacccaattccaagtgcaattgctgctaattcaggcatttattctggcggcagcagcggcggctcaagcggaagtgaaacacctggaacttccgaaagcgctacgcctgaatcttctggtggatcttctggcggatcttccgcatgcatgagcctgggacgtgccgttcatcaaaaacccggagatacaggacgatccgccggaaggcgaggggaagccgagccaaaagcgatgcgagacgaggcaagaacagcgcggcatgaaactgccagcccaggccgtgaagatcttttaggacaggctttggcatcagcaaaccttgaagcagcatggaaacgagtgaaaagtaatagaggatccgcaggtgttgacggactgagcatccgagacactgcagagcatttgaagatgcattggccaaggattagagcaagcctgttggatggctcatacagatctcagccagtgcggcgagtccagatcaggaagccagacggagggatgcgggagttgggtatcccaactgtcacagaccgcctgatccaacaagctttgcttcaagtactccaaccaagactcgatcccactttcagtgaacactcacatggtttccggcctggcaggagggcgcacgatgctgtgctggaagcgcagagatatgtgcagagtggatacagagtggtggtggatgtggatctggaaaaattttttgaccgagtaaaccatgatattctgatggccaggttggcacgcagaattgacgataaggctgttctgagactcattcgcagatatctggtcgcagggattatggatggtggtgttgtgatggaacgatacgagggaactcctcagggagggcctctgtcccctcttctggctaacgtccttctggacgaagttgatcgggaactggagagacgaggccatcgtttcgtgcgttacgcagacgattgtaatgtgtacgtaagaagcaggagggccggagagcgagtcctggctggactccgtaggctttatgaaaggctgcacctgaaagtgaacgaggctaaaactgcagtggctcccagtagccggagaaaattcctcggctatgccttctggtacgggccgggaggacaggcaaagtgcagagtcgccgataaggcaaaggaaacttttaagcagaggatccgcgaaatgaccagacgatccggtggtcgctctcttccagatattgtcgagaggctgcaaacctaccttcctgggtggaaggcctacttccaacttgcccaaacaccaaaggtgttccatgagctggacgagtggattcgtcacagactgcgcgctgtgcagctgaagcattggcggagaggaaagaccatgtacagagaactcaagacgatgggggcctctgagacagatgcccgacaggtagctgcaaattctcgcaggtggtggagaaattcccgctttctgctcaatagagctatgccgatcgcctattttgatcgcctgggtgtgccaagactgagttga

SEQ ID NO: 46 - DNA, 1962 bp, synthetic construct
  source 1..1962: mol_type = other DNA
atggactacaaagacgatgacgacaagtacccctatgatgtacctgattatgctgccagcaatttcacacagttcgtccttgtagacaacggcggcaccggggatgttacagtggccccgagcaatttcgcaaacggcgtagccgagtggatctcctctaatagcagaagccaggcttataaggttacatgctctgtaaggcagtcttccgcacaaaatagaaagtacacaatcaaggtcgaagtgcccaaggttgctacacagaccgttggtggagaggagttgccagtggctgggtggcgctcctacctgaatatggagttaacaatccccattttcgctaccaattcagactgtgaactcattgtcaaagctatgcaaggtcttcttaaggatggtaacccaattccaagtgcaattgctgctaattcaggcatttattctggcggcagcagcggcggctcaagcggaagtgaaacacctggaacttccgaaagcgctacgcctgaatcttctggtggatcttctggcggatcttccgcatgcatgcaggtggataaggttttcctgatgaccgataacctgtcttctacacaatgccggaacgagacattattgggagccgatggtatcagggcgcgggttgcaggacctcgcccaaaaggagtgagcgtaaaggcaactcctagctggactaaggcagatccgggatggtgtaacattgagaaggtcgttaattcaataattatcgatgaggccctcagtaaggtgatatccaaccgaggctccggtggcgttgaccatatcaccactgctgaactccgcgattattggagcaagtatgggggaaccattaggcaaaagattgtgcaaggaacatacatcccgctgcccgtgaaacgggtggacatccccaaaccaaacggtgacaaaaggatgctgggtattccttccgttattgacagagttatacagcaagcattggttaatgtgctcgagcccgtgtttgacccacagttttctgagttcagctacggctttagaaagggacggaacgcacaacaagcggtcttacaggcacagagttacattaaagacggacatagatgggttgtcgaactcgacttgtctaaattcttcgacagagtgaaccacgatatcctcatgtcacgcgtcgcccgggttgttgaagataaacggatccttaaattgataagaaggtacttgaatgccggcataatggaagatggcatcgtaaaacctcgcagcgagggagtgccgcagggcggacctttatccccgctcatgagcaacatcatcctgactgagcttgaccgcgagttggagaaaagaggccacaagttctgtagatacgcagacgattgtaacatctacgtgaagagcgaggaggccgctaagagagtgctcgaaagtgtcacaaagtacctcgagggcggcctcaaattgagagtcaatcgagataagtccgggacttttcggccatatgagtctgtctttctgggatacagtttccaccgccgaaactggacccgtattgtggtggcagaggagagtattaagcggctgaagacaaagcttaagataatctaccgtcatagtcggggcacgagcctgggcaccgcaataaaaaagttgaaccaaattctgaggggctggaggacatattttaagctggacaccaggaagggcttttttgagaagctcgatattaatattcggactcacctgcgggtcttgatttggcgagcatggaaaagaccacgtacccgcgaaagagagctccgtaaacgtgggctggacgcttttaatgcctggaagagcgccaacaacggccgcggcccctggtataatgcacgagcccctcacatgagaatagcaatcccaaatgctctgtttgtgagactgggcctgtacaacctttcttctatgggcacagtctga

SEQ ID NO: 47 - DNA, 1836 bp, synthetic construct
  source 1..1836: mol_type = other DNA
atggactacaaagacgatgacgacaagtacccctatgatgtacctgattatgctgccagcaatttcacacagttcgtccttgtagacaacggcggcaccggggatgttacagtggccccgagcaatttcgcaaacggcgtagccgagtggatctcctctaatagcagaagccaggcttataaggttacatgctctgtaaggcagtcttccgcacaaaatagaaagtacacaatcaaggtcgaagtgcccaaggttgctacacagaccgttggtggagaggagttgccagtggctgggtggcgctcctacctgaatatggagttaacaatccccattttcgctaccaattcagactgtgaactcattgtcaaagctatgcaaggtcttcttaaggatggtaacccaattccaagtgcaattgctgctaattcaggcatttattctggcggcagcagcggcggctcaagcggaagtgaaacacctggaacttccgaaagcgctacgcctgaatcttctggtggatcttctggcggatcttccgcatgcatggtgtcactcgaaaaaatacttgagcctagtaatctgactgaggccctgaaacaagtggtgtctaacaaaggggctccaggcgtggatggaatggccgttgacgagctggagcctttcattagaaaccatcccggagtgctgtcccaggccatccgggatggctcttatcgcccctctcccgtgaagagggtgtacattcctaaagacaatggggaaaaaagaccactgggcatccctactgtggtggacagactggtgcagcaggctatagcccagaaactttcagaagagtacgagcctaatttttccgacaatagtttcggttttcggcctaaacggtgcgcccatgatgccctgaagagaatagttgacaatgctaacgacggttatgagtacgtcattgatctggatctcgccaaatttttcgacaccgtgaaccatagcaaaatgatccaggttttgagcgagaccgtaaaggacggaagggtggtgagtcttgtgcacagatttttcagggccaagattaatgacgaaggcaaaattatcaaacctgccatcggtatgccgcagggcggaccactgagtcccgtctgtgctaacatactcctcaatgagctggatcagttacttgatggcaggggccatcgttatgtccgttacgcggatgacatgctcctgcagttcaggtcacttcgcgccgcagagagggtgttcacttccgtgaaaagattcattgaggagaaactcttcctcaaggtgaacgtggaaaagaccaagatatgccacctctcaaaagacgtgaagtttctgggctactccttctataaaagttatgacaaagacgacttggacgggaagggcaagtggaagctcgtagtacacggaaagaagaggagaagctttgagcagaccattaaaacactgctggataggaagtgtcctaagggcctggaaagatgtaaggaggatctgaaactctatctgtgtgggtggaccaattatttctacatggggctttccagatccagaagacagtcctatgataagtggatcagacggcggatcaggcagctgtactggaaaatttggaaaaagccttctacgagaatccgggccctgatgcagctggggatcgaacgtagcaaagctaacgagtgggggaactctagtaaggcctactggagggtggctggatcttggattctgaagcgatctctcacgaacgacgtgttgcaaaacttgggctggatatggttgggcatagcccggaagtggtcaccccagtga

SEQ ID NO: 48 - DNA, 1854 bp, synthetic construct
  source 1..1854: mol_type = other DNA
atggactacaaagacgatgacgacaagtacccctatgatgtacctgattatgctgccagcaatttcacacagttcgtccttgtagacaacggcggcaccggggatgttacagtggccccgagcaatttcgcaaacggcgtagccgagtggatctcctctaatagcagaagccaggcttataaggttacatgctctgtaaggcagtcttccgcacaaaatagaaagtacacaatcaaggtcgaagtgcccaaggttgctacacagaccgttggtggagaggagttgccagtggctgggtggcgctcctacctgaatatggagttaacaatccccattttcgctaccaattcagactgtgaactcattgtcaaagctatgcaaggtcttcttaaggatggtaacccaattccaagtgcaattgctgctaattcaggcatttattctggcggcagcagcggcggctcaagcggaagtgaaacacctggaacttccgaaagcgctacgcctgaatcttctggtggatcttctggcggatcttccgcatgcatgtgtgaaatacgaaaggtagaaacggacatggaacttcttgaggaggttctgtctaaagataacctcaataaggcctataagcaagtgtacaagaacaaaggagcttccggagtggatggcgtaactgtggacgagctcttctcttatatacaggaacacaaagaggaaatattatggaaaattagaaacaggaaatataagcctcagccggtgagaagggtcttaatccccaaagataatggcaaaatgcggaaacttggaatcccttcagtgattgatagagtgattcagcaggcgattgtccaggtcttaacccccatttacgaagagcaattttcaaaccattcatacggctttagaccgaagcgctcctgcgagatggccgtggtacaggcactggagtacttcaacgacggatatgactggattgtggatattgaccttcaaagcttcttcgatgaggttaaccaggataagctgatcgggattattagaaggaccattaaagatggggatttggttagcctcatacgaaagttcctgcagtcaggtgtgatggaaaatggcgtcttgcagccgacaaaaaagggtactccccagggggggaacctgtccccccttctgtctaacataatgcttaacgaacttgacaaggagttagaagcgagaagactgcatttcgtcagatatgccgacgactgtctcattctcgttaagagcgaaaaagcagcgaacagggttatggagagcattacgaagttcatcacaaagaaattaggactgaaggtgaatgtcgagaaaagcaagatcgctaggccagatgatataaaatatttaggctttggtttctacaagaaaataaatcagaatgagtggcggcccaaaccccatatcaagtccgtgcagaagtttaagacaaagcttcgcgacattctggtacgttcacgtagcattagcctcgacgatcgcctcctgagattgaagcagctcatttacggatgggtgaattatttcagaatcgccgatatgaccattcttctgcgtgacatcgatggcaacatccgtcgcaagttacgtgttatcatctggaagcagtggaagaaaataaaaaaacggtacgcctgtcttcgaaaattagagattactcatagggacgcttacgtgaccgctaattcacggagtggatattaccatatctctcatacaagggtgctggagaaggccatttcaaaagagcgcttaaacaagaggggccttgtaaactcactggattactatctgaaggtgcatataatcacgaattga

SEQ ID NO: 49 - DNA, 1938 bp, synthetic construct
  source 1..1938: mol_type = other DNA
atggactacaaagacgatgacgacaagtacccctatgatgtacctgattatgctgccagcaatttcacacagttcgtccttgtagacaacggcggcaccggggatgttacagtggccccgagcaatttcgcaaacggcgtagccgagtggatctcctctaatagcagaagccaggcttataaggttacatgctctgtaaggcagtcttccgcacaaaatagaaagtacacaatcaaggtcgaagtgcccaaggttgctacacagaccgttggtggagaggagttgccagtggctgggtggcgctcctacctgaatatggagttaacaatccccattttcgctaccaattcagactgtgaactcattgtcaaagctatgcaaggtcttcttaaggatggtaacccaattccaagtgcaattgctgctaattcaggcatttattctggcggcagcagcggcggctcaagcggaagtgaaacacctggaacttccgaaagcgctacgcctgaatcttctggtggatcttctggcggatcttccgcatgcatgtctaaagccatgaggcagatgcctgggcagcccggcagagtatgcgtggctcacggcgaagccgtgcgcgacctcatctcagatgaggcaggaggcccacctcgcgaacatcccgatactggctctgcaactcctccgacaggacccggggggttgctggcagcgatgctgaccagacagaacttacagttagcatggaagagagtcaaggcgaataaaggagcagctggagtggatggacttgacatcgaacagactgctcagacacttcgtactcgttggcccgatattagacagtctctgctgcaggggcggtacaggccgtctcccgttcgtaaagttatgatcccgaagccagatggaacacagcgcgagctgggtattccaacggtcactgaccgcttaatccagcaggcacttctgcaggtgctgcagcccttaatagaccccacattcagcgaacacagctatgggttcagacccggacggagggctcatgatgcggtgaaagccgcccgagcgtacgttcagtcaggaaagagagtggtcgttgatgtggatctcgccaagtttttcgatagagtgaaccatgacatattaattgatcggctcaacaggagggtggacgacgccggagttattagacttgttcgcgcttacctgaacgcaggtattatggacggaggggtcgtggtggatcgacacctgggaaccccccagggcggacccttaagtccactgttggccaatgtactgctggatgaggtggataaagctcttgaggcccgcgggtattgctttgcccggtatgcagacgactgtaatgtgtacgtgggctccaagaaagcgggagagcgggtgatggcatatccgtacctgcggaggctttatgtgaacctgaagctccagataaacgaggccaagagcgctgtcgcgtccgccttcggccggaagttcctgggttatgccttgtgggtggctaaaggcagggaagtcaagtgcaaagtggcgcagaaacccctgcagaactttaaggcgaggattcgacagttaaccagaaggagtggcggccggagcatggctcaggtcgtcgataagctccggccctacttgctcggatggaaggcatatttcgggatggcacaaaccccgggggtttggaggggactggatgagtggctgagacaccggctgcgcgccatccagctcaggcaatggaagagaccaaagactatccatagagaactgaaggctctgggggcgtcagacgacgttgcgaagcaggtggctggtaattgccaccgttggtggcgaaactcagacggtgttatcaagcgtgttttggccatagcgtactttgacagactgggagtgccacgactgagttga

SEQ ID NO: 50 - DNA, 1908 bp, synthetic construct
  source 1..1908: mol_type = other DNA
atggactacaaagacgatgacgacaagtacccctatgatgtacctgattatgctgccagcaatttcacacagttcgtccttgtagacaacggcggcaccggggatgttacagtggccccgagcaatttcgcaaacggcgtagccgagtggatctcctctaatagcagaagccaggcttataaggttacatgctctgtaaggcagtcttccgcacaaaatagaaagtacacaatcaaggtcgaagtgcccaaggttgctacacagaccgttggtggagaggagttgccagtggctgggtggcgctcctacctgaatatggagttaacaatccccattttcgctaccaattcagactgtgaactcattgtcaaagctatgcaaggtcttcttaaggatggtaacccaattccaagtgcaattgctgctaattcaggcatttattctggcggcagcagcggcggctcaagcggaagtgaaacacctggaacttccgaaagcgctacgcctgaatcttctggtggatcttctggcggatcttccgcatgcatgaaggagactaagaagtgtgatgaaagtcgccagctcaacatccagacaggacacctgcaaaaagaccgcgtcgagttggagtcctacgctaaagcgcccagcattagcgtaacttctgacaacaggcagaatgcgaggcgagaatgtcactacggcctgctcgaaaatataatatcttccgagaacctgaatgaggcatttaaacgtgtcaagaaaaataaaggttctcatggggaagaattgagacaatctatcgccgacggtagctataaaccaaacccagttcgcagggtggaaatacccaaggataacggcaaaattcgcccacttgggattccaactgtagttgatcgagtgattcagcaggctatatcacaggtgcttacacctatattcgaaaagaaattttctgaaaattcttatggattccgacctaatagatccgcgcatcaggccattctcaaatgtaaggagtacatggacgaggggtaccgatgggcagtcgatatagatctggaaaaatatttcgatacggtaaatcatgacaaactgatcggattgatatataaagaaatcaaggacattcgggtgattggacttatcagaaaataccctaatgctggcgtgatggaaaaagggttgaccagtctcactctcgagggcgtcccacaaggtgggaatctttcacctcttctgagcaatataatgctgaacgagcttgatatggagcttgagcggagaggtcttcgcttctgtcgttatgctgacgactgtaacgtttacgtgaagagcaagaagagcgccgagagggttatgaagagtataacaaagtttatagaaaaagacctgaaactgaaagtaaataaggaaaaatctaaggtggacaggccatggaaactgaaatatctgggttacacgttttatacaaagaaaggcgagatgggaatccgtgtgcaccaggtatctattaagaaactgaagggaaagctcaagtcaattaccggtaggtccaacgctatgagcatggagctccgggccgttaagctgaaacagctgatcgttgggtggataggttacttcaagctggctgatatgaaaagcacgctgagggaattggatgagtggctgcgacggcgcctgcggttatgttactggaaacagtggaaaaagatcaagaccaaacatgacaatcttgttaagttgggggtcgaaaactggaaggcttgggaacacgcaaatacacggaaaggctactggaggatctctaattcccccatattagcgacgacactcaccaataagtatttgcgcgagcagggcttcatcacgctgtctgaacggtactcacaggtccgatga

SEQ ID NO: 51 - DNA, 20 bp, synthetic construct
  source 1..20: mol_type = other DNA
tggcgagaaaggaagggaag

SEQ ID NO: 52 - DNA, 20 bp, synthetic construct
  source 1..20: mol_type = other DNA
ccgaaacaagcgctcatgag

SEQ ID NO: 53 - DNA, 132 bp, synthetic construct
  source 1..132: mol_type = other DNA
gagtccgagcagaagaagaagttttagagctagaaatagcaagttaaaataaggctagtccgttatcaacttgaaaaagtggcaccgagtcggtgcgtgatgggagcccttgttcttctgctcggttttttt

SEQ ID NO: 54 - DNA, 112 bp, synthetic construct
  source 1..112: mol_type = other DNA
gttttagagctagaaatagcaagttaaaataaggctagtccgttatcaacttgaaaaagtggcaccgagtcggtgcgtgatgggagcccttgttcttctgctcggttttttt

SEQ ID NO: 55 - DNA, 202 bp, synthetic construct
  source 1..202: mol_type = other DNA
ggcaaaccgcctctccccgcgcgttggccgattcattaatgcagctggcacgacaggtttcccgactggaaaggagacccgggcagtgagcgcaacgggtctccaatttaagccagccccgacacccgccaacacccgctgacgcgccctgacgggcttgtctgctcccggcatccgcttacagacaagctgtgaccgtctc

SEQ ID NO: 56 - DNA, 21 bp, synthetic construct
  source 1..21: mol_type = other DNA
gagacggtcacagcttgtctg

SEQ ID NO: 57 - DNA, 38 bp, synthetic construct
  source 1..38: mol_type = other DNA
gctcttccgatctnnnnnattgacggcggcatcggact

SEQ ID NO: 58 - DNA, 39 bp, synthetic construct
  source 1..39: mol_type = other DNA
gctcttccgatctnnnnngagacggtcacagcttgtctg

SEQ ID NO: 59 - DNA, 34 bp, synthetic construct
  source 1..34: mol_type = other DNA
gctcttccgatctnnnnnggcaaaccgcctctcc

SEQ ID NO: 60-61 - skipped (2 entries)

SEQ ID NO: 62 - DNA, 10 bp, synthetic construct
  source 1..10: mol_type = other DNA
cgagcagaag

SEQ ID NO: 63 - DNA, 13 bp, synthetic construct
  source 1..13: mol_type = other DNA
gtccgagcagaag

SEQ ID NO: 64 - DNA, 20 bp, synthetic construct
  source 1..20: mol_type = other DNA
aaaaaaagtccgagcagaag

SEQ ID NO: 65 - DNA, 55 bp, synthetic construct
  source 1..55: mol_type = other DNA
attgacggcggcatcggactnnnnnnnnnnnnnngagacggtcacagcttgtctg

SEQ ID NO: 66 - DNA, 1323 bp, synthetic construct
  source 1..1323: mol_type = other DNA
atggctagcgcatggagtcatcctcaattcgaaaaatccggaatggatacctcttctctgatggaacagattctgagcaaggagaatcttaatgccgcctacttgcaggtagtgcggaacaaaggggcggcgggcgttgatggcatgaatgtagaggaactcggcgcctatttatccgagaatggcgaaaacattcgtgagcaattacgcactcgaaaatacaaaccgcagccggtccgtagagtggaaatcccaaaaccggacggcggtgtacgtaacctgggggttcctacagttgttgatcgtttcgtacaacaagccgttgctcaggttttaacacctatctttgaagaacagtttcatgatcattcctatggttttcgcccgaatcgctgcgcacagcaggcagtactgaaagcacttgagatgatgaatgatggtcacagttggatcgttgatatagatctggctaagtttttcgatacggtggaccatgataaactgatgactatcttcgggcgtacaataaaagacggcgatgtgatttcagtcgtccggaaatttcttgtctcaggcgttatgattgatgacgagtatgaggacacgatcgtaggtaccccacagggtggtaacatttcacctcttctggcgaacattatgttaaatgagcttgacaatgagcttgaggctcgcggcctgaatttcgttcgatatgcagacgatcttattattatggtcgggtcaaaacaagcagccgaccgcgtgatgaaaagtgttacccggtttatcgaggaaaagctgggtttgaaagttaacgcggaaaagtcaaaagtggacaagcctaaaggtatcaagtacttgggttttggtttttatttcgatacttttgctaaggcatataaagcgcgtcctcatcctaaagcagttactaaatttaaagcacagatgaaaaaacttacttgtcgttcatggggcgtaagtaacgcctataaagtacaaaaactcaatcagctgattcgagggtggatcaattattttaaaataggaaacatgaaacgtctttgccagcgtttggattcaaatattagataccgcctccgtatgtgtatttggaaacactggaagacgcctaaaaacagagccaaaaatatgatgaaactgggtctgccggcatgggctgcatggcgctctgcctatatccatggttacgctcgagtgtgccgatctcgagatgtccatcggacaattacctcagaacgtttgaaacagtttggactgatgagtatgaccgattattatactgaacgtagcgtagcgtgctga

SEQ ID NO: 67 - DNA, 1326 bp, synthetic construct
  source 1..1326: mol_type = other DNA
atggctagcgcatggagtcatcctcaattcgaaaaatccggaatggacaccagcagccttatggaacagattcttagcaaagataatctcaatgcagcttatctgcaggtggtccgcaataagggtgctgcaggtgtggatggcatgaccgtggaagagcttggcgcttatctttcggaaaacggtgaatctattcgggagcaacttcgtacccgtaaatatagaccccaaccagtgcgtcgggcagaaatctctaagccggatggtggcgtgcgtaaattaggcgtaccgactgtagttgatagatttgtccagcaggcggtagcgcaggtgctgactcctatttttgaagaacagtttcatgaccacagctacggttttcgacctaaccggtgtgcgcagcaggccgtgctcaaggcattagagatgatgaacgacggccatagttggattgttgacattgatctggctaaattttttgatactgtagatcatgataaacttatgaccattttcggtcgcactattaaagatggtgacgtgatctctgtggtacgtaaattcctggtgtccggtgtgatgattgatgatgagtacgaagatacgattgtcggcactccacagggaggcaatatctctccgcttctggcgaacatcatgctcaacgaacttgacaaggagctggaggcgcgtgggctggattttgttcgttacgcagacgatttgattattatggtgggtagtcgccaggccgctgacagagtaatgaagtcggtcacccgttttattgaggaacgattaggccttaaggtcaacgctgagaaaagcaaagtcgacaaacctaaaggcataaaatatcttgggtttggattttactttgacagttttgccaaggcgtacaaggcccgcccgcatccaaaggcggtggccaaatttaaagcccagatgaaaaaacttacttgtagaagctggggagtatcgaattcatataaggttctgaaactgaaccagctgatacgcggttggatcaactattttcgtatagggagtatgatagagctgtgtaaacgtctggatgagaatattcggtttcgcctgcgtatgtgtatatggaaacactggaaaactccgaaaaaccgcgccaagcttttaatgctgctcgacgttccgcgctgggccgcttataagatagcatactcaggcaaccgttatgcgcgcattacccataatggttgggttcataaggcaatttccaataaacgtctcgcggccttcggcttgatctccatggaagactactatgcgaaacggcgtgttgcgtgctga

SEQ ID NO: 68 - DNA, 1326 bp, synthetic construct
  source 1..1326: mol_type = other DNA
atggctagcgcatggagtcatcctcaattcgaaaaatccggaatggacacaagtagtttgatggagcaaatactgtcgaaagacaatcttaatgctgcatacttacaagttgttcgaaataaaggggcggcaggggtagatggcatgactgtagaggaattaggtacctatctcagtgagaacggtgagtcaatccgtgagcaacttagaacgagaaagtataagccacagcctgtaagacgcgttgagattcctaagccggacggcggtatacgcaacttaggggttccgacagtagtcgaccgcttcgttcaacaggcagtagctcaggtgctgactcccatcttcgaagagcaatttcacgaccattcctacggattccgccctaatcgatgtgcgcaacaagctgtcctgaaggcgctggagatgatgaatgacgggcacgattggatcgtggacatagacttggcaaaattcttcgatactgtagaccacgataaacttatgacaatattcggacggaccattaaggacggggacgtcatctctgtggtgcggaagttcttggtttccggagtcatgattgacgatgagtacgaagacacgatcgttggaacaccgcaaggtggcaacattagcccaccactcgccaatattatgcttaacgagcttgataaagaactggaagcacggggcctggacttcgtgcgttacgcagacgatctcattataatggtaggatcccgccaagcagccgatcgtgtaatgaagagcgtaacgcgctttattgaggagcgcctcggcctgaaagtcaacgcagaaaagagtaaggtcgacaagccgaagggaatcaagtatctgggtttcggtttctacttcgatagttttgccaaggcctacaaggcgcgccctcaccaaaaggccgtggccaagttcatggcgcaaatgaagaagttaacttgtcgttcttggggtgtatcaaacgcgtacaaggtccagaaattaaatcagcttatcagaggctggatcaactactttaagattggatcaatgaaggggctttgcgaacgcctggactgcaatattcggtatcgccttagaatgtgtatctggaaacattggaagacaccgcaaaatcgggcgaaatacttgatgcaactgggtattggacggaagtacgcctggagtacggcatatactggcgcccgtatagcgtacgtttgtcaacggggtgccatgaacatggccattaccaaggaacgccttacgagatttgggttggtaagtatggctgactattacgccaagcgtcgtgtcacgtgctga

SEQ ID NO: 69 - DNA, 1323 bp, synthetic construct
  source 1..1323: mol_type = other DNA
atggctagcgcatggagtcatcctcaattcgaaaaatccggaatggatacgtcttctctgatggagcagattctgagcaaggaaaatctgaacgaagcctatctgcaggtcgttcgcaataaaggtgcagccggcgttgatggtatgtcggttgaagaattaggcccgtacctttccgaaaatggtgaaaatatccgcgaacaaatgagaacccgtaaatacaaaccacaacctgtgcgccgcgtggaaataccgaaaccggacggcggtgtgcggaatctcggtgtgccgaccgttgtagatcgcttcgtccagcaagcggtagcccaggtgctgtcaccaatctttgaagaacagtttcatgaccacagttatggtttccgtccaaaccggtgtgcccagcaggcagtgttgaaagctctggaaatgatgaacgacggccataattggattgtagatattgatctcgccaagttctttgatacagttgaccatgataaactgatgacgatttttggtagaacgatcaaagatggtgacgtaatttccctggtgcgcaaatttcttgtttctggtgtgatgatagacgacgaatacgaagatacgattgtcgggacgcctcagggtggtaatatcagtccacttcttgctaacatcatgctgaacgaacttgacaaagaactggaggctcgtggtttagattttgtgagatatgccgatgacctgatcatcatggtgggttctcgccaggcagccgaaagagtaatgaaaagcgttacgcgttttattgaaaataaattaggtttaaaagttaacgctgagaaatcccgggtagataaacctaagggcatcaagtatctgggttttgggttttattttgattcgtttgcaaaaggctacaaagcacggccccatatgaaagctgtggaaaaattcaaagaacagatgaaaaaattgacatgtcgctcttggggcgtatcaaatacctacaaagtaaaaaagctgaaccagctgatacgggggtggatcaactattttaaaataggttccatgaaaaacctgtgccgtaaattagatgcacacattcgttttcgtttgagaatgtgcatatggaagcagtggaagacgccaaagaacagagaaaaaaatctgattaaactgggcttacctcgttatgcagcccatgggatctcctatgcaaaagggtatgcacgcgtctgtcgttcttggaatttacacatcagtatctcgaaagaacggctggccaagtttggactgatttcaatggaagattattatgcagagcggagagttacgtgttga

SEQ ID NO: 70 - DNA, 1332 bp, synthetic construct
  source 1..1332: mol_type = other DNA
atggctagcgcatggagtcatcctcaattcgaaaaatccggaatggatacctcaagcctgatggagcagattctttcaaatgagaatttgaatgcggcttatttacaggtcgtccgtaacaagggagcagcaggtgtggacggtatggagtatacagagttacaaaaacatctcagcgagaacggggagataattaaagaacagcttcgcacacgtaaatataagcctcaaccagtccgtcgcgtagaaattccgaaagccgatggaggtattcgcaaactgggcgtcccgacggttaccgatcggtttattcaacaagccattgcacaggtcttaaccccaatttatgaggaacagtttcacaatcatagttatggctttcgccccaatcggtgtgctcaacaggctgtcatgaaagctctggagatgatgaatgatggccatagctggatcgtagatatcgatttagaacgcttttttgacaccgttgatcacgacaaattaatgacaattataggccgcaccattaaggatggtgacgttatatcaatcatcagaaagtttcttgtctcgggcataatggtcgatggcgagtatgaagatagcgtaattggtacgcctcaaggtggcaatttatcaccactgttagccaacattatgttaaacgaactggataaagaaatggaagctcgaggtctggattttgttcgttatgccgatgactgtattattatggttggctccagacaggctgctgaacgtgtgataagatcaataacccgctatatcgaagagaagttggggttgaaagttaatgcgtcaaaaagtaagatagacaaaccaaagggaattaaatatctggggttcggattttattatgactcatttgcaaaagagtaccgtgctaaacctcatgcaaaggccgtcgagaagtttaaagcacgtatgaaagagctgacgtgccgttcttggggtgtcgataacggttataaggtcaaaaagctcaatgaattgatccggggttggataaattatttcaaaattggaagcatgaaagggttatgcgagaaactggacgcgaacatccgttaccgcctgcgcatgtgtatttggaaacactggaaaacacctcagaacagagcaaagaatctcattaaactcggaatatcacgccggtacgcatggtcaaccgcgtattccggggcacgtatcgcgtacgtctgtcagcgtggggccatgaatatagctgtaaccaaggagagattgaccagattcgggttggttagcatgcttgactactacgtcgagcgccggagcttgatgctgtcgtga

SEQ ID NO: 71 - DNA, 1347 bp, synthetic construct
  source 1..1347: mol_type = other DNA
atggctagcgcatggagtcatcctcaattcgaaaaatccggaatggagttaattgattggattctggcagaccaaaatattgatgccgccatttgggctgtgaaacataatcgtggtgccgcggggattgattccatgcaggtcgacgaactggatgagtatttcaaaaatcatcgcgaggaaatcaaacagcttatccgtgaaaaaaaatacgtacctcaaccggtccggcgcgtatacatccccaagccggacggaaaacaaagaccactgggcattccgaccgtcgtcgatagagttatccaggaggcaattgccatagtgctgatgaaaggatatgatcgctacttttcagagtatagctacggatttcggcctaatcgtaattgccatcaagccgttacgaaagccctggaatatatgaattctggctatgaatgggtggtggatctggacatagaaaagtacttcgatactgttaatcatgataaactcgtttctattctgcgggaacgcataaatgacgatacgactcttcacttgattcgggccttcctgaaagcaggtgttatggaaaacggtctggtttcccctaccgaacagggagtaccgcaaggcggccctctgagccctgtgttaagcaatgtgtatttggataagcttgatcgcgaacttgaaaatcggggcctgcacttttgtcgctatgcagacgactgcaccatctacgtcggatcggaaatggctgcgaatcgtgttatgcgctcaattgcggactggcttggccgaaagttaaaattacgcgttaacatgacaaaaagcaaggttgtacgccctagtggctcacagttcctgggctttagattttggaaaagtccgcgcgaaggatggaaacccaaaccagcaaaagagcgctgtaaacgtctcaaagacaaggtacgggcaatcttatgccgccgcaaagccgttgcggtaccgctcggtgttacgatcacaaaactgaaccaactgatgcgtggctggattaattacttctgtctcgggagcatgaaaggttttatgaaggaatttggcgaatggatgcggcataaggtacgagtggtcatcttaaaacagtggaagaaggcggataccatctatcgcaatttacggaaaacgaacagaatttgtcgctgcgggattagtgatgaagaaatatacaaggtcgcatactcaggtcggggctggtataaaagagcaacacacaatgcagtaaatttcatcctgagtccacaagttttatctcagagaacgaaacagcgcccagggctcgttgatcctctgaaatattatctggcaagatgtacctga

SEQ ID NO: 72 - DNA, 1434 bp, synthetic construct
  source 1..1434: mol_type = other DNA
atggctagcgcatggagtcatcctcaattcgaaaaatccggaatgggaaccgaaaaccgcgaatcatgtagtcaacgtgattcagctgaaagaaaaggatatgtccgtgcgcatagaagttttaaccgtatttggaaggaacgggatagcgccgaaccagatattctcggcaaaattctggagaaagataatctcaaccgggcatataaacgtgtgaaagccaataaaggcgctccgggcgttgatggtatgacaattgaagccacattaccgtggttaaaagagcacaatcatgaacttgttgaacgtatcagaaaaggaaaatatacaccgagtccggtgcgtcgcgttgaaatcccgaaaccggatggaggtatacgcaaacttggaatcccgaccataattgatcgtattattcagcaggccatgcttcaaccgctgctgcctatctatgagccccttttttcagatgattcgttcgggtatcgccctggtcgaggtgccaaggacgcgatttttcgcatcaaagaatacattgaacaaggctacacaagagccgtggttttggatctgtctaaatattttgacacgctcaaccacaccatactgcttaatctgctgcgtcgccaggtcaaggatgaacgcgtcattcaaatggtgaagcgctaccttaagtctggtgtgatggaaaatggtgtggtcgcagaaaccgaagaaggatcaccgcagggggggaacttgtcccctctgttagcgaatgtgtatttgaatgaatttgactgggaattccatcgtcgcggcgttccgtgcatacgttatgccgacgatatagttctgttagctaaaagcgaacgagctgcggagcgcctgctcgagtcatcagctaaatacctcgaggaaaccctcaagctgaaggtgaatcgggagaagagccgtaccgtatcggtgttcgccatccgcaattttaaatttctgggcttctgtttcggaaagaatggtaagggtatatatattcggattcacggcaaatcctggaagaaagctaaagacaaacttcgtcagctgacgtctagatccagatgcggttctatcgtgcgtacaatggaaaaaatcaaagtgtatatgcgtggttggttaaattattatggcattgctgatatgaaaaataatatggaaagtttgaacggatggctctatcggagaatccggatgtgcatttggaagcagtggaaactgccgaagaccagaaaacgaaaactggctggtctgggagtcgattcacactatgccgcaactattgcctacgatcgcaagggttattggtttaacgcgggtaataaggccgtgaactgggctctgagcaaggaacgcttgaccaattgggggctgtacgatctggctacggcatatcaaagtgtccatgtaaattattga

SEQ ID NO: 73 - DNA, 1323 bp, synthetic construct
  source 1..1323: mol_type = other DNA
atggctagcgcatggagtcatcctcaattcgaaaaatccggaatgaaacttattgaaactatactcttttcagagaacgtaatcaaagcccagagccgtgtattatcaaataaaggcggagcaggcattgatggcatgcacgtggacgagctggcagaatatatgcgtgctaactgggatggtattaaagaaagtattctggtgagaaaatacaaccctgctcctgtacgccgtgtcgaaattccaaaagtaaacggtggagtgcgtaaattaggcatccctacggtccttgaccgcactattcaacaggccattgtgcaggtgttatcacctattttcgaaaacgagtttcaggaaaatagctacgggttccggccgtgtcgttcgtgcgaacaggcgattttaaaattattagagtatcttaatgaaggttatgagtggatcgttgatattgatttggaaaagttcttcgataatgtaccgcaggataaactcatgagttacgtcggcagagtgatccgtgatccggatactgaatcactgatccgcaagtaccttaagagcggcgtgatggaaaatggaatctacgaagccacagaagagggcaccccccagggcggtaacctctcgcctttattgagtaacattatgctgaacgaactggataaagaattagttaaccgtggcctgcattatgttcggtatgcggatgactgcgtgattgcggtgggcagtgaggcaagtgcaaaacgtgtcatgcggtcagttacgacctggattgaacgggaattgggcttaaaagtgaacgcttcaaaatctcatatatgccgtccaaccaagttgaagtatcttggcttcggcttttatcgaaacccccaaaatcgccagtggcagtcgcgtccgcacgaaagctcagtttcgaaattcgttcgctctctgaagcgcttgtgcaagcgaagctggtcagttagcatgacagatagaattactcgtttgaattatgttacccggggctggatcaactatttctcaatttccttcatgaaattgaagctcgagaaaattgatgagcatttacgtaccatgctccgcaaggtaatatggaaacaatggaagacacctcaaaagcgtgcgtggggtttaagaaagctgggtgtcgacagcgccttagctcgccgtacatctttttgtggggatcgctacgagtgggtagtgcgccgcacttgtgtagcccgcgcaatttccaaagatgtttttacgcgtcgcggcctggtttcgtgccttgattattaccttattagacatagcttgaaaacgtcgtga

SEQ ID NO: 74 - DNA, 1443 bp, synthetic construct
  source 1..1443: mol_type = other DNA
atggctagcgcatggagtcatcctcaattcgaaaaatccggaatggagtcttacctgacgcaagatagagcggagccagaagcaggttgtggtgcgaattcggtatcggacactgagggtgacgggcgcaccgtacaacatgacctggtggaagaggttgtctcttggagtaacctggaagccgcgttaaagcaagtggtgtcgaatcgtggggcccccggggtcgatgggatgacagtcgacgagttaggaccgtggttagaaaccaattatagtgagttggcagaaaaggtacgtaatggtcgatatcgtccaaacccggttcgccggaaggagattccgaagccgaacggcggtgtgcgtgacctcggaataccgactgttgttgatcgtctgctccagcaagcagtgagtcaggttttgatgcctatttatgagcctagcttctcagacacatcatatgggttccgcccgggtcgttcagcacatgacgcaattcagaaagccaaagagtaccttagcgagggcttcgggtacgtagttgatctcgacttagcgagattcttcgacacacttaatcaagattacttgatgaacatccttcgtgagcgtgtccgcgataaggccctgctggagctgattaaacggttccttcggagcggcgtcgttcttccgaacggcctgctccgcgagacacgtgaaggtagtcctcagggtggaccgctctcgccattacttagtaacatataccttgatcggttcgataagctcctggaaagccgcgggcttcgcttcgtgcgttacgcagatgactgcttggtcttcgtgcgaactccgcgcgccggcgaacgcgtccgcgaatcagtcactcgttacttagagggcactttgcggttacgcgtcaaccaagaaaagaccgtagtcggacgtgcggatcaggtgaagtttctcgggttcagattgtaccggcaaaagactgttggtgccaccgttcatgactcctcattggcgagattccgaaaggaagtacgccgcatcaccaaacgtaatcgcggtacgagcctgggcagcgtactgacagagctgaaaacctttacgagaggctgggtggggtatttccggattggcttaagtaagtcacgtgccgaaaagctggatggctggattagacagcgcgtccgacaatacattttcaagcaatggaaaaccctgcgcaaccgagcaagtcagttagtatctttatgtcccgactatttgcggccgcgcccgggtttcacaccatacagttgggtgcgcgagtgtcgccgcgcggcattttcgcgctcgtactggaaggcagtgaactatccagttgtcaagagagctttatctaattcgtacttagccggccttggactgtactccctgtctgagcaattggaaaagtggaataaaggcgtttga

SEQ ID NO: 75 - DNA, 1449 bp, synthetic construct
  source 1..1449: mol_type = other DNA
atggctagcgcatggagtcatcctcaattcgaaaaatccggaatgaaggatggtatgcagaaaacatccgcattagccaacgactatccgcagcgtaatcgtactgaatcggaacgttatggaggtgtgcaaacctttatgtggatgacggaagacaacattgttgaggtgccttttgacaaggaacacctgttagaagttatcttgtctccggataatctgaataaagcctataaagcggtcgtccgaaataaggggtgcggcggtatcgataagatgtcctgcgaacaactgttgccatggttgaaagccaataaagacgaactcattcgcagcctgttagacggaacttaccgtcctaatccagttagacgggttgaaattcctaaggataatggtaaaatgcgtcttcttgggataccgaccgtggtagatcggatggtacagcaggcgattaaccaggttctgactgtaatctatgaaccacaatttagtaaacggtctttcggatttcgaccgagacgtggctgcccaactgccttacgtgaagtgcaaaaaatcgttaatgaaggttacaagtatgttgtagacttagacctggagagatttttcgacacagtttcacattcaaagttgatcgaaattctcagcagaacattaaaagacgggcgtgttgttagcctgattcaccgctatctgcggagcggcgtcattgacaagggcctgtggcatgcttctgaggagggtacccctcagggtgggccgttatctccactgttgtccaatattatgcttaatgaactggataaagaactggcgcgcagaggtcacccatttgtgagatatgctgatgacagcatgatattttgtaaaacaaagcgcgcagctgagagagtgagagaatcaatcactaagttcattgaaggtaaactttttttgaaagtcaataaagagaaaacagctgtctcatacattaagggggtgcggtacctggggtattcattttatattcataagggcaaatgtcagctgacagttcaccctaagtctaaggcgcgcatgaaatcgcgtctcaaagagcttacgagccggtcaaacggttggggttacgagaaacgtaaacagaagcttaaagagtatattcagggttgggtgggatattaccatctggcggatatgaagcgtttatgcatggaaactgataaatggctccgacgtcgcattcgcatgtgtatctggaaagcatggaagaaacctcgtactaaggtagcgaacctgataaaatgtggcatcgcagagtggcaagcctatcagtgggggaatacacggttggcgtattggcggatcgcccacagccccatcctgttaacagcaataagcaatgatcgcctgcgtaaacaaggatatatgtgccttatggatctgtatctggagtggaaccccaaatga

SEQ ID NO: 76 - DNA, 1413 bp, synthetic construct
  source 1..1413: mol_type = other DNA
atggctagcgcatggagtcatcctcaattcgaaaaatccggaatgtctcttggtcgtgcagttcatcagaaaccgggtgatacaggacgcagcgcaggccgtcgtggggaggcagagccaaaagctatgagagatgaagctcggaccgcccgccacgaaaccgcgtcgccgggccgtgaagacctgttaggtcaagccttagctagcgctaaccttgaagccgcctggaagcgtgtcaaatcgaacagaggttccgcgggagtggatggattatctatccgtgatacggccgaacatttgaaaatgcactggcccagaattcgtgcctcgttgctggatggtagctatagatcgcagcctgttcgccgtgttcagattcgtaaaccagatggcgggatgcgtgaacttgggatccccaccgttacagatcgcctgattcaacaggcactcctgcaggttctgcaaccgcgtttagacccgactttttcggaacattctcacggctttcgtccgggacgacgggctcatgacgctgttcttgaggcgcagcggtatgtccagagtggctatcgtgtagtggtggacgttgacctggaaaaattctttgatcgcgttaatcacgacatcctgatggcccggctggctcgtcgtatcgacgataaagccgttttacgtttgattcgtagatacctggtagctggaattatggatggaggggtagtgatggagcgctacgagggaactccacagggaggaccgctgagtcctttattagctaatgtgctgctggatgaagtggatcgagaacttgaacgtcgcggtcaccgctttgtccgatacgctgatgattgcaatgtttacgtccgctctcgccgcgcgggtgaacgtgtgctggcgggcttgcgtcggctgtatgaacgcctccacctgaaagtgaatgaggcgaaaactgcggtggccccttcaagtagacgaaaatttctgggttatgctttttggtacggtccgggcggccaagccaaatgtcgcgtagctgataaagctaaagaaacatttaaacaacgtattcgcgaaatgacccgccgtagtggaggtcggtcactccctgatatagtcgagcgtttacaaacatatttgccgggttggaaagcatattttcagcttgctcagacgccaaaagtatttcacgaactggatgaatggattagacatcgcctgcgcgctgttcagttaaaacattggcggcgcgggaaaacgatgtatcgggaactgaaaacgatgggagcaagtgaaacggacgctcgtcaagtggcagctaactcccgtcgttggtggagaaattcgcgcttcctcctcaaccgtgccatgccgatagcatattttgaccgcttgggggtaccccggttgtcgtga

SEQ ID NO: 77 - DNA, 1458 bp, synthetic construct
  source 1..1458: mol_type = other DNA
atggctagcgcatggagtcatcctcaattcgaaaaatccggaatgcaagtggataaggttttcctcatgaccgataacttaagttcaacgcaatgcagaaacgaaactctgcttggggcagacgggatacgggcgagagttgcaggaccaagaccgaagggagtctcggtaaaagcgacgccatcatggacgaaagcagaccccggttggtgtaacatagagaaggtggttaacagtatcattattgacgaagcacttagtaaggttatttccaatcgtggcagtggcggggtcgaccatatcacaacagctgagcttagagattattggagcaagtacggtggtactattcgtcagaagatcgttcagggaacctatatcccccttcctgttaaacgcgtagacataccgaagccaaacggtgataagcgaatgctgggcataccatcggtaatagatcgcgtgatacaacaagctttggttaacgtcttggagcccgtatttgacccacaattctctgagtttagttacgggtttcgcaagggtcgcaatgcgcagcaagccgtactgcaggcgcagtcatacataaaggatggacaccgttgggtggttgagcttgacctgtctaagttcttcgatagagtgaaccatgacattttaatgtccagagttgcacgagtggtcgaggacaagcgcatattaaagttaattcgccggtatcttaacgcgggtattatggaagacggtatcgtaaagccgcggtccgagggagttccgcaaggcgggcctctgagcccactgatgagcaacattatcctgaccgagctggatcgtgagttggaaaagcggggccataagttctgtcgttacgcggatgactgcaacatatacgtgaagtccgaagaggctgcaaagagagttctcgaaagtgtgaccaaatatcttgaaggtggcttaaagttgcgggtgaaccgcgacaagagcggtacctttcgtccgtacgagtctgttttcttgggctactcattccaccgtcgcaactggacgcggatcgtcgttgctgaggaatcaattaagcgcttgaagaccaagttaaagattatctatcggcacagccggggtacatcccttggcaccgctattaagaagctcaaccaaatccttcgaggttggagaacgtatttcaagcttgacacgcgcaaaggattcttcgaaaagcttgacatcaacattcgcacacacctgcgagtactcatatggagagcctggaaaagaccacgcactcgggagcgtgagttaagaaaacgtggccttgacgctttcaacgcatggaagtcggcgaacaacggacggggtccctggtacaacgcacgggcgccccacatgcgcatagctattccgaacgctctgtttgtaagactgggtctttataatctgtcttcaatgggtaccgtctga

SEQ ID NO: 78 - DNA, 1332 bp, synthetic construct
  source 1..1332: mol_type = other DNA
atggctagcgcatggagtcatcctcaattcgaaaaatccggaatggtgagtctggaaaagatcttagaaccatcaaatttaactgaagccctgaagcaggttgtaagtaacaaaggagcgcctggcgtagacgggatggcagtagatgagcttgagcctttcattcgcaatcatccaggtgtgttgagccaggccatccgtgatgggtcttatagaccaagcccggtcaaacgtgtgtatattcccaaggataatggtgagaaaagacccctcggaatcccaaccgttgttgatcgcttagtccagcaagctatcgcacagaaactgtcggaggaatacgaacctaatttcagcgataactcctttggcttccgaccgaagcggtgtgcccacgacgctctgaagcgcatcgtcgataacgcgaacgacgggtatgagtatgtcatagaccttgatctggcgaagtttttcgacactgttaatcatagcaaaatgatacaggtattgtctgaaaccgttaaggatggacgagttgtttcactggtccatcgattttttcgtgccaaaattaatgacgaaggcaaaattattaaaccggccattgggatgcctcagggagggcccttatctccggtgtgcgccaacatactgctgaatgaactggaccaattattagatggccgtggtcatcggtatgtgcgctatgcagatgatatgttgcttcagtttagatctctgagagctgccgaacgtgttttcacctcagtgaaacggtttatcgaggagaagctgtttttgaaagtcaatgtcgagaagaccaagatctgtcatctgtcaaaagacgtgaaattcttagggtattcattctacaagtcgtacgacaaagatgacctggatggcaaaggtaaatggaaattagtggtgcacggcaagaaacgtcgttcttttgagcagacaatcaaaacattgcttgatcgaaaatgtccaaaaggactggaaagatgtaaagaagatttgaaactgtatttatgcggttggaccaattatttttacatgggactgtcccgttcgcggcgccaaagttatgacaaatggattcgacgtcgaatacggcagttatactggaaaatttggaaaaaaccgtccacccgcattcgcgcactgatgcaactggggattgagcgttccaaagcaaatgagtggggtaatagtagcaaggcgtattggcgtgtagccggcagctggatcttgaaacgctcacttaccaatgatgttctccagaatttggggtggatatggctgggcatagcccgcaaatggagtccgcaatga

SEQ ID NO: 79 - DNA, 1458 bp, synthetic construct
  source 1..1458: mol_type = other DNA
atggctagcgcatggagtcatcctcaattcgaaaaatccggaatggaaactcgccatggcatgaagtatcggcaactgcatattgaggattacttaggagagattcctgcggaacagggacgagggaccggtgtgtatgcacacgaatggattactggcaacccggacaccaacactgatttttggaccgataacctgttagacgctatacttagaagtgacaaccttaacgcagcctataaacgcgtcaagtcaaatcgcggaactggaggtatcgatcgcatgcaggttgacgaacttctcccatatttgcgtaatcaccgtgacgagttgatacgccagctgagagagggtaagtacaagccgaatccagtccgtcgggtagagataccgaaagaaggtaaggataaagtacgcaaactcggaattcctaccgtggttgatagaatgattcagcaggcaattgctcaggaactgacagctgtatatgaagagcagttctctgaaaattcctacggttttcgtccgggtcgtagtgcgcacgacgcgcttgaaaaatgcagagaatatgtcaatgagggctatatctatgcaataagtatggatctgcaggcctactttgatacagtgaatcattcgaaattaatagaagtactgagtagaaccataaaggacggccgcgttatttcactgattcataaatacctgaaagcaggtgttatggaagatggtggcttccacgcgaccagtgaaggtgtgccacaaggcggtccactgtccccgctctgtggcaatgttatgcttaacgaacttgataaagagcttgaacgacgtggtcacaagttcgttcggtatgccgatgattgcattgtactgtgcaaatccagaaaatcagccgaacgaacacttaaacatataatcccctatataactaaaaaactttacttaaaagttaatcttgaaaaaaccactgtttcgttagtaagcaaagtgaaatacttagggtatggtttttaccgtaataagggtaagtgtcgtatgagagttcatccaaagtcgatcagaaagatgaagaatcatttgcgtgagttgaccgtacggggcaataaatggtccaatccggaacgggaggaaaagttacgccgttacactacgggatggattaactattatagactcgctgatatgaagagcttgatggaaacaactgacgaatggctgcgtcatcgaattcgggcggtgtactggaaacagtggaaaaaagttcgtacacgctataaaattttgagaacgctgcacttaccagaatggaaagttcatgaattggccaactgtcgtaaaggaacgtggcgtgctgcgtccacgttgaattcggtactgaccaaaaccgttatcgttgatcggcttggctatccaagtatgaccgcgcattacctgaaagtccgggtgaattactga

SEQ ID NO: 80 - DNA, 1350 bp, synthetic construct
  source 1..1350: mol_type = other DNA
atggctagcgcatggagtcatcctcaattcgaaaaatccggaatgtgcgaaatacgaaaggtggaaacggacatggagctgttggaagaggtgttgagcaaagacaacttgaacaaggcatataaacaggtatacaagaataaaggtgcctcgggtgttgacggagttacggtagacgagttgtttagctacattcaagaacacaaagaggaaattctgtggaagattcgtaatagaaagtacaaaccacaaccagttcgtagagtcctcattcccaaagataacgggaagatgcgtaagctggggataccgtcagttatagatcgagttatccaacaagctatcgtgcaagttctcacacctatttatgaagagcagttctctaaccatagttacgggttccgtccaaaacgttcatgcgaaatggcagtagtgcaagccctggagtacttcaacgacgggtatgactggatagttgacatagacctgcaatctttcttcgacgaggtaaaccaggacaagttgataggcatcattagacgaacgattaaggacggtgaccttgtatccttgatccgtaagttcttacaatctggtgttatggagaatggagtactgcaaccgaccaagaagggtacacctcagggtggaaacctttcccccttactctccaacataatgctgaacgaactggacaaggagctggaagctcgacgcctgcactttgtcagatacgcagatgactgccttattttggttaagtcggagaaggctgccaatagagtaatggagagtataaccaagttcattaccaagaagcttggtctgaaagtcaatgtggagaagtccaagattgccagaccggacgacattaagtaccttggtttcggtttctacaagaagatcaatcaaaatgagtggcgcccgaaaccgcacataaagtcggtacagaagttcaagacgaagctccgtgacattcttgttcgtagccgttcaattagtctcgacgatcgactgttgcgccttaagcagctcatttacggctgggtcaactactttcgtatagcggacatgactattttgcttagagacatagacggtaacattcggcgcaagcttcgggttattatctggaagcaatggaagaagattaagaaacgctacgcgtgtttgagaaaactcgaaataacacatagagatgcttacgtgacggctaactcacgatcaggttactatcacatctcccatacccgcgttttggaaaaggctatttccaaagagagattgaataagcggggccttgtgaactcgttggattattatctgaaagtccacatcatcacgaattga

SEQ ID NO: 81 - DNA, 1434 bp, synthetic construct
  source 1..1434: mol_type = other DNA
atggctagcgcatggagtcatcctcaattcgaaaaatccggaatgtcgaaggcgatgcgtcagatgccggggcagcctggtcgtgtgtgcgtcgcacatggtgaagcagtgcgcgatttaatttctgacgaagccggtggaccccctcgcgaacatccggataccggctcagcaacgcctcccactggaccaggcggtttattggcagctatgttaacccgtcaaaacttgcagctggcctggaaacgggttaaggccaacaaaggtgcagctggcgtggacggattggacatagaacagactgcgcagaccctgcggacgcgttggccggatattcgccagtcattactgcaaggtcggtatcgtccttcacctgtgcgaaaagtgatgatcccgaagcctgatgggactcaacgtgagttaggaataccaactgttacagaccgtctgatccagcaagcacttttacaggtgttacagcctctgattgacccgaccttcagcgagcactcgtacggctttcgtccaggccggcgcgcgcatgacgcggtaaaagctgcacgtgcttatgtccaatccggaaagcgtgttgtagtggacgtcgatctggcgaagttctttgatcgggtgaatcatgacatactgattgatcgcttgaatcgtcgagttgatgatgctggcgtcatccgtcttgttcgagcttatcttaacgcaggaatcatggacgggggtgtggtggtcgaccgtcacctgggtaccccgcagggagggccgttaagtcctctcctggcaaatgtgttacttgatgaggttgacaaagcgctggaagcacgtgggtactgcttcgctcgttacgcagacgactgtaatgtctatgtaggttctaaaaaggctggcgaaagagtaatggcctatccgtacttgcgtcgattatatgtcaatcttaaactgcaaataaatgaagccaaatctgccgtagcttcagcgtttggacggaaattcttaggatacgcgttatgggtcgctaaagggcgtgaagttaagtgcaaagtggctcaaaaacctctccaaaatttcaaggcgcgcatccgtcaactgacgcgtcgcagcgggggtcgttctatggcccaggttgtcgataaattgcgcccataccttttagggtggaaggcatattttggtatggcgcaaacaccgggagtctggcggggcctggacgagtggctgcgtcatcgtctccgggcaattcaactgcgtcaatggaagcgacctaaaaccatacatagagagctgaaagcactgggtgcatcagacgacgtcgctaaacaggtggccggtaattgccaccgttggtggcgtaattcagatggagttatcaagcgtgtcttagcgattgcttattttgatcgtctgggtgtgccccgtctgtcatga

SEQ ID NO: 82 - DNA, 1395 bp, synthetic construct
  source 1..1395: mol_type = other DNA
atggctagcgcatggagtcatcctcaattcgaaaaatccggaatgcaacaaaagacgtacagagatccggatgcgggaagacgcggtgaagctcctgacgccggcagccaaggcgcggagactgtacaggcccctactacccgtgagtcaccgagttcaacagcgtggttgatggaagccatatgtgaaccggtaaacctgcggcatgcactgaaacgtgtcaaggctaataaaggtgccgcgggggctgatggcatgagtgtgtcagagttgcccgactacttacgccatcattggcctgaactgaaagcccagctgcttagcggtagttatcgtccgtctcccgttagacgtgttaccatacccaaaccggggggaggcgaacgtctgctgggcatacccacagttgttgatcgttttatacaacaagcaatgatgcaggttctgcaggcacagtgggatgcaacgttttctgattccagctatggattccgcccaggtcgcagtgctcaccaggccgtgaaacaggcacagaaatatatcgagtctggatatagttggggtgtggatcttgaccttgaaaagttctttgaccgcgttaaccatgacgtcttaatgtctcgcatcgctaagcgcgtgagcgataaacgggtgttaagtttgatccgaggctaccttaatgccggtgtgatggaagcgggccttgtgatgccagtaactgagggcaccccgcagggaggacctctgagcccgctgctttcaaatttgctgctggatgacttcgataaagagctggaaaaaagaggtttgaagttcgcacgctatgctgatgattgtaacgtgtatgtcaaatcggagcgagccggaaatcgcatgatggcaggtttaactcattggttaaatcgtaagctgaaacttaagctcaatgctaaaaaatctgcggtggcactgccagaaacccggaaatttttgggttattcatttcgccgcggtcgaaaagtttggtgtgtcgtttcgcctgaaagcgtaaaacgatttaaaacccgtattcgggagctgacgggtcgtaataccggtaagagcttggaacagcttatcgaaccgttaaaacggtatttaaccggttggaagtcatattacggactgaaccagtggcagacattaatgcgggaccttaatcgttggattagacgccgtctgcgatctgtcctgtggaaacagtggaagaccggctcgaaacgttttaaagaattacgtcgaagaggagttagcaaggatcttgcggcacagacagtcggatcttgtcataaacagtggcgcataagctgctcccctgccttgtcaattgccttacccaatcgtttgtttgtccgactgggtttgccagaactgtga

SEQ ID NO: 83 - DNA, 1452 bp, synthetic construct
  source 1..1452: mol_type = other DNA
atggctagcgcatggagtcatcctcaattcgaaaaatccggaatgcgttcgcaggaggggcggagacaacaaaaagcccccgaaggggcctacctgtgggaggaaatggtcaaaccatggggtactacgggtggtccgtcaccgtcatccgcacaaggtggggccactccccgaggaggtcagggcagcgggttaatggaacaggttgtggaacgcagcaatatgctggctgccctccgccgcgttgaacgaaacggaggggccccaggcgtcgatgggatccctactgaacgcctcagagatcagatccgtgcggaatggccgcgaattcgtgaagaactgctggccggcacataccgtcctaaacccgttcggcgcgttgaaataccgaaacctggcggaggtaaacgtttacttggaatcccgacggctgtagaccgcttgattcaacaagcacttctccaggttttaacgcccatatttgatcctcaattttccgaggcctcctatggtttccggcctggacgccgggcccatgatgccgtgcgaaaggcccgtcagtatgttgaagaaggatacgaatgggctgtcgatctcgacatcgagaaatttttcgatcaggtaaatcatgacatactgatggcacgtgtagcacgcaaagtgacagataaacgtgttctgaccctgattcgtcgttatctgcaggcgggggttatggtcaatggtgtcgtcatcgaaacaggtgagggtacaccacagggtggtcctttgagcccactgttggcaaatattcttctggatgatttagataaggaattggaaaaaagaggccacaagtttgttcggtacgctgacgactgtaacatatatgtgaaatccaaacgggcaggggaaagagttatggcgagtatccgtaagtttctgcaggaaagactcaaactgaaaataaacgaacagaaatctgcggtggatagaccgtggaagctgaagttcttaggattttcgatgcataagcgcaagaccggtgaaatcctgatacgcctggccccccaagcaattgaaagagttaagggaaagatccgagaaatcaccgctcgcaataaacccgtatctatggcggaacgtatagaacgacttaacacttacttgggtgggtggattggatacttcgccctcgcagaaacgccgtcggttttcgaggagatagagggctggatgcgccgccgactgcgtatgtacctttggaaacagtggaaacgcgtgcggactcgctatagagaactgcgtgccctcgggttgtccgaatgggttgtgcaccagttcgctaatgcacgcaaaggtccttggcgcatggcccatggcccgatgaatcgtgcgctgggcaatgcctattggcagtctcaggggttaatgagtttaaccgaacggtatcagagtctgagacaagcctga

SEQ ID NO: 84 - DNA, 1422 bp, synthetic construct
  source 1..1422: mol_type = other DNA
atggctagcgcatggagtcatcctcaattcgaaaaatccggaatggtaaagcccttacgccttgatcgtagagctgaaagatcaccgacgccgtcagaaggaatgtctgaggccgttggggaaggagtctgggaacaggtattcgagcgcaagaacttactgtcagcactgaagcgcgtcgaggccaatggtggagcccctggggttgacggcatgactgttgaagcgttgcggccctacctcaaggctcactggctggagctgcgtgcagcattagacagcggtaactaccgtccctcacctgtgcggcgtgttgagatagggaagcccgatggtggagtacgcctgctggggataccaaccgttgtagacagattaatccagcaagccatcggtcaggtcctcactcctttgttcgaaccggtgttttcacctcattcctacggattccgcccaggtcgccgtgctcaggacgctgtggaagcagctcaagggtatataagagagggatatacgtgggtggtagatatagaccttgagaagttcttcgaccgagtgaaccacgataaattaatggcaagagtcgcccgcgcagttaaagacaagcgtgtattaaagctgatcagaagatacttgcagagtggggtaatggtcaatggtgtggtgatggagacggaagagggaacaccacaaggtggtccgttgtcgccgttactcgcgaatattatgcttgatgacctcgataaagaactggagcgtcggggtcaccgatttgtgcgttatgcagacgactgtaatatatatgtgcgtactgagcgggccggcgagcgtgtcatggacagtgtgcgaggctttcttgagaagaaactcaagttgaaggtcaacgagaagaagtcggctgtggcccgtgcgggtcagcgtaaattcttagggttctcctatttctaccgcaagggagaagttctgattcgtgtcgctgagcaagcgcaacaacggcttcgagaaaagttacggggcctgacgcgtcggactcggtcaggccgtctggaagagataattcaacaactcaaggaatatatgcgcgggtggatgggttatttcagactggccgacacccctagtgttttcgcgggattagatcactggctgagacggcgcctgcgtcaactgctgtggaaaagatggaagcgtgggactacccgttggcgtgagcttgttagtctgggtgtccctcggcgccttgcgggactcggagcgacaggaagttcaccttggcgtatggccggcactccagttgtccacatggctctttcgaatgcgttttgggatgcacaaggtctttgcagtttcacggagtactaccaccaactgcatttaccaagacgcactgcgggttgcggtcctgcatgtccggtcgtctga

SEQ ID NO: 85 - DNA, 1413 bp, synthetic construct
  source 1..1413: mol_type = other DNA
atggctagcgcatggagtcatcctcaattcgaaaaatccggaatgggtgaagttagagttaaaccggggggtactccgcgtggtcgttctatagatcgccaggatttaaaattaatcttaagacgggaaaagtatcgtatggaccttatggagcaaatgctgtcgcgagagaatatgctgcaggcattgcgtcgcgtagaagcaaacaaaggagcagcaggaattgacagtgtcagcactcgccagcttcgtgcacatgtggtccagcattgggaaactacaaaagcaaaacttttggcgggtacgtataaaccaagcccagttcgccgcgtcgagattccgaagccggacggaggcgtccgtctgctgggtattccgacggtcatggatcgtttgattcagcaggcaatcttgcaggttctgacccctatatttgacccgacgttttccccacactcttatggttttagaccgaaacgtcgtgggcatgatgcagttcggcaggcccaggaatatatacgagaaggttatagatatgttgttgatatagatctcgagaaatttttcgatcgcgtgaatcacgatatcctgatgtctcgtgtagcgcgtaaagtcaaagacaagcgtgtgttaaaactcatacgggcttaccttaaagcaggcattatggcagaggggattcgagtgcgcagcgaagaaggtactccgcagggtggcccgctgagtccccttctggctaatattctcttagatgatttagacaaggagctcgaacgccgccagcttagattcgtacgttatgctgatgattgcaatatctatgtcaaaacccgtcgggcgggtgagagagttaaacggtccattacaaagtatttggaaaaaaaactgaaactgaaggtaaacgaggcaaaaagcgctgtggatcgtccatggaaacgcaaattcttggggttctcatttacatttcacaaagaagctcggattcgaatcgcgcccaaatcgctgaaacgagtaaaagacaaaatccgtagtctgacgagaggcaaccatttgacatcaatggaaactattattgaagacttaaatcgttatctcatgggatggatgggttattacgcgcttatggacaccccatcaactctgaaagcattggacgaatggatacgacgcagactgcgcttagttttatggagccgctggaaacgcgtacgtacgcgttaccgtatgttacgcgcactgggtctgccagaacgtgatgtgcataaactcgctaatacacgcaagggagcatggcggacctcaaagactccacagatgcataaggcactgggaatcgcatattggaagagtcagggcctgatgtcgctcactgagcgttactttgagatcagacaaggctggagaaccgcatga

SEQ ID NO: 86 - DNA, 1404 bp, synthetic construct
  source 1..1404: mol_type = other DNA
atggctagcgcatggagtcatcctcaattcgaaaaatccggaatgaaagagacaaaaaaatgcgatgaatctcgtcagctgaacatccagacgggccaccttcaaaaagatcgcgtcgaattagagagctatgccaaagcgccctccattagtgtgaccagtgacaatcgccagaatgctcgccgtgagtgtcattacggactgttggaaaatattataagcagtgaaaatctgaacgaggcatttaaacgtgttaaaaaaaataaagggtcacacggtgaagaactgagacagagtattgcggacggcagctataaacccaatccggttcggcgagtcgaaatcccaaaggataacggtaaaattagaccccttggtattccaacggtggtagaccgcgttatacaacaggccatttcacaagtgttaacacctatatttgaaaaaaaattttcggaaaatagctacggcttccgtcccaacagatccgctcatcaagctatccttaaatgtaaagagtatatggatgaaggctatcgttgggcagtggacattgacctggaaaaatatttcgatacggttaatcatgataaactcatcggactgatttacaaggaaataaaggatattagagtaataggacttatacgcaaatatcctaatgctggcgttatggagaaaggccttacgtctttgacccttgagggtgtgccgcagggggggaacctcagcccgttactgtctaatattatgctcaatgagctggatatggaattagaaagacgcggtcttcggttttgccgatacgcagatgactgtaatgtatatgttaaatccaaaaaatcagctgagcgtgtgatgaagagcattacaaagttcattgaaaaagatctgaaactgaaagtgaacaaagagaaaagtaaagtagatcgaccttggaaactgaaatatctgggctataccttttataccaaaaaaggagaaatggggattcgtgtacatcaggtatcaatcaagaaactcaaaggtaaattaaagagtatcacagggcgttccaatgccatgtccatggaactccgcgctgtgaaactgaagcagttgattgtgggttggattggctattttaaattagctgatatgaaatccactttacgcgaacttgatgaatggctgcgacgccgtcttcgcctgtgctattggaagcagtggaaaaaaatcaagactaaacatgacaaccttgtgaagttaggcgttgaaaattggaaggcatgggaacatgcgaacacacgcaaaggctattggcggatttctaactcgccgatacttgccaccaccttgaccaacaaatatctgcgcgaacaggggtttatcacgctctcagaacgttacagccaggtgcgctga

SEQ ID NO: 87 - DNA, 1410 bp, synthetic construct
  source 1..1410: mol_type = other DNA
atggctagcgcatggagtcatcctcaattcgaaaaatccggaatgagcatgtgtgaagctctgagacagatgccggaacgctcaggacgtgtccctcttgcagatggcgaggcaggtcgggcctccgcgtctgatgaagcgacacgaccccgacatgaaaccggaagcacaggttccgccttactgatggcagctctgactcgtgaaaatctgcagcaggcatggaaacgtgtgcgagcgaataaaggtgccgcaggggttgatgggcgcgacattcctgaaacagcctgttaccttcgaaccgcttggccggtgattcgtgatcagctgctgcagggtacttatcgaccttccccggttcggcgggttactattccgaaacccgacggaggggagagagaactggggattccgacggtgacagaccggctgatacagcaggcgttgcttcaggttttacaacctttactggatcccacattttccgagaattcatttggttttcgccctggccgtagtgcccaggaagccgttgtccgcgcacaagcatacgtccagagcggccgtcgtattgtcgtcgacgtagaccttgagaaatttttcgatcgtgtcaatcatgacatcctcttgggtcgtctgcagaagcgtattggggatgccggtgtgctgcgcctgattcttgcttatctgaatagcggtatcatgcagaacggtgttgtcgtatcgcgctatcaaggcaccccacagggggggccactgagtcctcttttagccaatgttcttctggacgaagttgataaggagcttgaacgtagaagtcactgttttgttcgctacgcagatgatgctaatgtttatgtccgtagtcagcgcgctggcgaacgcgtaatggcccttctgcggaaaatgtatgccaaactccaccttaccgtcaacgaggcaaagtctgcggttgcatcggctttcggacgcaaatttttaggattcagtttttgggtcgcaccgcagggcgaaatcaagtgcaaagtggcagcaaaaccgatggcgacttataaacaacggatccgtcagctgacgcgacgctcggggggacgtagcatggcagaagttgtagagaatttgcgcccgtacgttttggggtggaaagcgtattttcgcctttctcaaaccccgggcgtgtggcgcacgctcgacgaatggatgagacatagattgagagcaattcagctgaaacattggaagcgtggccccacaatgtatagagaattaaaggctcttggagcatcagaaaccgttgctcggcgtgttgcggggaatgcacggtcgtactggcgcaatgccgaccggttattgaagaccattctgaccatagcctactttgatcgtcttcgcgttccacgactgtcatga

SEQ ID NO: 88 - DNA, 1302 bp, synthetic construct
  source 1..1302: mol_type = other DNA
atggctagcgcatggagtcatcctcaattcgaaaaatccggaatgatgatggaacaagtcgtatcgcggcagaatatgcttgcggcttaccaaagagtggttcgcaatcatggatctgcaggcgtcgacggcgtgactgtggaggatttagccgaatactcccgtctgcattgggagcgcattcgtaccgaacttctggaaggacgctatcagccgcaacccgttcggaccgttatgatacctaaaccgggaggcggggagcgggaactgggtataccgacagttatggatcgaatgatacaacaggcagttcaccaggttatgagtccgcagttcgatgcgggatttagcgaagcctcctatggctttcgacctggtcggtcagcgcatggtgctgtggagcgcgcacgcgaacacatgaccgcaggtcatcgctgggttgttgatattgatttagagcgcttcttcgatcgcgtcaatcatgacgtcttaatcgcgcgggtttcccataccgtaaaggataaacgtgtcttgcgccttatcgggtgctatctttcagcaggtttaatgcagggtggggtggtttcaccgagatcggagggcactccacaaggcggaccactgtctcctcttctgagcaatattttgctcgacgtcctcgataaggagctggagcgtcgtggccatcggtttgtcagatacgcagatgattgtaatgtatatgtgcagtcccggcgggcaggtgagcgggtgatgggctcgctccgtgtatggctggaaaaaagactgcgcctgaaaataaatgcatccaaatctgctgtcgatcggccttggcacagaaaattcctgggttattctgtcacgacgcaaaaacgaccgcgtttaaaagtgtctgctgaatcagttaaacgcatgaaacaacggcttcgtgagctgctgcgcattggtcgcggcagatcacttcgtactgtcattgccactgttgccgtttacctgcgtggttggctggggtattatcgtaaagccgaagttcgcaatgtttttgaagatctggatcagtggcttagaagaaaattgcgtcgcataatgtggaaacaatggaaaaaacctaaaacacgttatcggaagctgcgtgcgtatggtgtagccccggatcaggcgcgccgttctgcatggaacggacgaggtccgtggtttaatgctggtgcatcacacatgcatcttgccgttccaacgaagctgctgcgtaactggggattaccatcactgcttgatgaacatcagcggcttcagagactgtga

SEQ ID NO: 89 - DNA, 1497 bp, synthetic construct
  source 1..1497: mol_type = other DNA
atggctagcgcatggagtcatcctcaattcgaaaaatccggaatgatctccatgcaaaccgtcaaagccgaagtaagtgaacgggccgccgagacgcaatcgacggaccgaaagagtacaaagctgccactgggcgctgacgttggcgccgccacgagtgagcaaacaaagtctgaggggcattctcttatggaacaagtagtcgaacgctcgaatctctggttagcgtatcaacgggttgtccgaaataagggtgcgcctggggtggatggtttaacagtaggcgaattcaaggattggctgaaaatgcactggccaagtgttaagaaagcacttctggaaggtgattacctgccccggccggtacgacgggttgacatcccaaaggccagcggcggtatgcggactcttggggtacccacagtcgttgaccgtctgattcaacaagctctgcatcaagttctgcaaccgctgttcgaaccgacgttttcacaaggttcgtacggttttcgtccccgtcgcaccgcccaccaagccgtacgtcgtgcccagtcatatattcgtgagggcaagcgttgggtggtcgatctggacttggagaagttctttgaccgtgttaatcatgacgtccttatggcacgggtggcgagacaagtcagagacgcgcgcgtgttgaagttaattagacgcttcctggaagccggaatgatgcgcgaggggttagtcgagccacggagcgagggaacgccccaaggtggccctctgtcacctttattgtcaaacattctgttgacggatctggaccgcgagttagagagacgaggtcttgcgttctgccgatatgccgacgattgtaacatatacgttggctcacgtgttgctgcagagcgtgttatgggtggtattagaaccttccttgaagaggttttacgactccgtataaatccagcgaagtcagcggtggcgcgtccctgggaacgtaagttcctcggtttctcgttcactgctcagagagaagcccgcttaagaatcgcactccaatccgtgcgtagattgactgaacgtgttcgggagttattaagagctggccggggtcggagtcttgcccatactattgacactctcaaccctttactgcggggatggatcagctacttccaattgactcagtgtaagggtgttttagaggagcttgacggttgggtacgccgcagattgcggtgtgttctgtggcgacagtggaagcgtagccgcagtcgtgcaagacacatgcgggccttgggtttagacgctgcccgcgcacgatgtagctcacaaaatgggcgtggcagttggtggaatgcaggggcaagccatctgcaccaggcccttccggcagcttacttcaaattaggtgcggggttagcagtagctagagccactgccactccggtttgcagtctgaatcgtcgcatgcgcaatagaacgtctggcggagtcggcggtcgacgtgcatga

SEQ ID NO: 90 - DNA, 1446 bp, synthetic construct
  source 1..1446: mol_type = other DNA
atggctagcgcatggagtcatcctcaattcgaaaaatccggaatgaaagaagggaaacagaagatttcgaaagacacctgtcaacagaaagatcgcgcggagcccgatggctatgcgggcgggcagacattcatctggatgaccgaaaataacattactaatgtcgacaactcaaagtacggtttacttgagtacattttgtctccacaaaacctgaacgcggcctttaaacgtgtaaaaagtaataaaggttccggtggcattgacaaaatggaagttgaatcgctgggcgactaccttatttgccacaaagaatccttgatccagagcatcttagatggtaactaccggccgaatccggtccgccgcgtggatatcccgaaagataatggtcagaaacgcagcctcggtattcccacggtggtcgatcgcgtggtccaacaggcgattgcgcaagttctgtcgccgatctatgaaaaacaattttccccaaattcttacggctttcgcccgaaacgtagcgcccaccaggctttaatcaagtgtaaagaacatattacctcagggtataagtatgccgttgacatggatctggagaaatttttcgacacggtgaaccagtcaaaactgatcgaaattctctcccgtaccgtgaaagatggccgtgtggtatctttaattcataagtacctgcgcgctggcgtggttgttcgtaataagtttgaagagagtaaaatgggagttcctcagggcggcccgctgtcgccactcttgagcaatatcatgctgaacgaattagatgaagaactggagaaacgcggtcaccatttcgttcgctatgcagatgatatgctgatcctgtgcaaaagtattcgctctgcgaaacgcactaaagcaacgattattgcatacattgaaggccgcctcttcctgaaagtaaacaaggacaagacctgcgtggcctatatcagcaaaatcaagttcctggggtatagcttttacgtcaataagaagaaaggtcgtctgcgtctgcatccgaaaagtctggccaaaatgaaagagaaaatccgtgctttaactagccgtagcaatggatggggcgatgcgaaacgtaaacttgagctcaaacaatacatcaccggatggcttaactactttaagctggccgacattaaaagtctgctgtcgcgtattgatgaatggtatcgccgccggctgcgtatggtaatttggaaacagtggaaacgggtgcgttcacgtggccgcaacctgattaaacttggtattgcaaagtataaagcgtgggaatatgctaacacgcgtaaagcctattggcggacctctaacagccctatcttgaacacatccatcacgaatgaacgtttgaaacaggcagggtatattttctttgcggattattatcgcaaagtgaacggtgtcaattga

SEQ ID NO: 91 - DNA, 1440 bp, synthetic construct
  source 1..1440: mol_type = other DNA
atggctagcgcatggagtcatcctcaattcgaaaaatccggaatgaaagggcgtatgcagaaaatttctaaagatacttggctgcagaaagaccgtgctgagccggatagctatgctgcggggcagacctttatgcgtattacggagaacaatctgactgatgtgaccacgttggaagatggattgctggagcaaattctgtcgccatcgaatcttaatcgcgcctataagaaggtgcgtagtaacaaaggtaaaggcggcgtggacaaaatgggtattgaacacttgcaagactatcttgtagagaatcgcgtggaattactgcagtctatccgcgatggcaagtatcgtccaaaaccggttcgtcgtgtcacgattccgaaagagaatggtaaaaaacgtctgttaggtctgccaaccgtagtcgacaaagtgattcagcaggcaatcactcaggttctcagcccgatctacgaaaaacagttctccgcatacagctacggctttcgtccggggcgcaatgcccatcaagccctgaaaaaatgccgtgattatatttctgatggtcatatctacgcggtggacatggatctgcaggaatttttcgataaagtaagtcacagccgcttggtagaaattctgagccgtaccatcaaggacggccgcgttatttctctcattcataagtatcttcgcgccggcgttatgattggtaataagttcgaagaaacggaactcggtgtcccgcagggcgggcccctgtcacccctgctgtccaacatcatgttgaacgaactggacaaagagctgcaacgtcgcggtcaccgcttcgtccgctatgcggatgatctgatgatcgtgtgcaaaagtaaacgtagcgcgggccgcacccttcggaacatcatccctttcatcgaagataaactttttctgaaagtgaaccgcgagaaaaccaacgtgagtcatgtttccaaaatcaagtttcttggacacaccttttatcgttcacatggtaaaggccgtttccgggcacatcctacgtcgattcggaaaatgaaacagcgtttaaagcaattaacatcccgttcgaatggctggggcgaagatcaacgcaaggaaagcttaaaccactacgttcgtggatgggtcaactattttaagatggctgacatgaaatcattactgcggaaaatcgaccgctggtaccggcgtcgtttgcgtatgtgtatttggaaacagtggaaacgcatccgcaccaaaggcaaaatgctgattaaactggggctgaacaaatggaaagcatgggaatacgccgatacccgtaagagtcactggcatattgcgaatagctttattctcacacgcaccattactacacatcgtctccgccaggcgggttacccgtttctgctggattattattcaaaagttcgcacgtga

SEQ ID NO: 92 - DNA, 1455 bp, synthetic construct
  source 1..1455: mol_type = other DNA
atggctagcgcatggagtcatcctcaattcgaaaaatccggaatgcgtggcgtgaaacccaccatggaaaagaaactgaccaaaatgaaagtttctaaccagtctggctacaccggtttttcgattttcagcttgggggagatttgtttagaagaagttactgatggttataatctggagaaggcgttgaaatgtgtggcgcgcaataaaggtgccccgggcatggatggagtcgaaaccaaagattatgccctgcatcggcaaattgccggttttaaagatcttatcgacgatatttccgccggtacatatcgtccaaaaccggtcaaacgggtgtatatccctaaagaaaacggcgataaacggccgctgggtattcccacagttgaggatcgtgtggtgcagcaggcactggccaacattctgagcaagtattacgaagaggaattttcagacaacagtttcggctaccgcccgggccgtggttgccgtcaagcggttaaacgcgctttgaaatatgtaaacggtggccgccagtgggtaatcgaccttgatctgtcgaagttttttgacaccgtcaaccactcaaaactgctgcagatcctttcagagaaaatcaaagatgggcgcgtgatttcactgattcataagtttctgcgcactccaatctatgaaaatggggtggtaagcccgaaaagtaaacaaggtaccccgcagggcggaccggtatccaccattctcgcgaacattatcctgaacgaatgcgaccagatgatggacaaagaaaatattaagtttgttcgctatgcggatgacatgatgatcttttgcaaaagtaaagaagctgccgaacgcaccctgaacaaggtgacaaagttcttagagaaaacgctcttcctgacggtcaataaagaaaaaaccaagatcttatggtacacgcatgggacacagtttttgggtttcacgttgtcccagtatgtgccaaaacacattaagaaaatcgcaccgaaatgtaaagtttacgttaaagtccatccgaaaaaacgtgagaaatttcaaaaaggcatcaaagaaaccctggatcgtcgcgcaccgggcgggattgaagaaacgaagaaaaagtttaaccaaaaaattcggggatggttcaactacttcaaaggcagcattccacagaagtggatggaagagacggatgcatggatgcgtcgccgtatccgtcagatgtattggaaacaatggaaaactcctcagaatcgtatggaaaatttcagcaaacttaatcccaaaagtccttctcggcgtgattacgcgtactctaacaatagctattggcgcatggctcgcacgaaacagatgcacaatgcactctcgaaccgtaccctcactagcatgggctggctgtcgttacaggaactgaacgcgcagtacctgcaagagatgtccggaaattga

SEQ ID NO: 93 - DNA, 1317 bp, synthetic construct
  source 1..1317: mol_type = other DNA
atggctagcgcatggagtcatcctcaattcgaaaaatccggaatggagctgttagaacagattctgagtaatagtaaccttaacgaagcctacaagaaagtttatcgcaataagggggcgtctggagtagatggcgtgacaatcaatgagttgaaagaatatcttcagaataacaaacacaaacttctctctgaaattcgtgcacgtaagtataaaccgcaaccggtgaaacgtgtggaaattccgaaagcatccggtggtgtgcgcaaactcggcattccaactgtggttgatcgcgttatccaacaagcgatcaatcaagtgttaacgccgatctacgaggagcaattttccgaatccagctacggctttcgccctcgccgtagcgctcagggcgccgtcttacgttcgctggaacttattaacgatggttacgattgggtggtggatatcgacctcgaacgttttttcgataccgtccatcatgaccgtctgatgaatatcatttcccggactatcgaagatggtgacgtgattagtctgattcgtaagtttttagtaagtggtgtaatgattgacaacaagtatgaggataccatcattgggacccctcagggtggtaatctgtcacccctgctgagcaatatcatgctgaacgagctcgacaaagaactggaaattcgtggcctggattttgtccgttacgcggatgattgcatcattctcgtatcgtcaaaaaaatcagctaatcgtgtaatggcaagcgttaccaatttcatcgaaaaaaagctgggcctgaaagtgaacgtcacaaagagtaaggttgatcggccgaacaacatcaagttcttgggctatggttactattatgacggtaaagaaggaaagtatcagttgcgcccgcacgaaaaatctattcagaaattcaaacggacgttaaaacgtttgaccaaacgctcgtggtcggtgtctctgaactatcgcctgtttaaaatccgccaggtcattatggggtggatccagtactttaagtatggcaaaatgaaaagcaaacttaaagttatcgacagcaaactgcgcgcccgcattcggattgtcatttggaaacaatggaaagttccaaaaaaacagatcaactcactgatgaaactgggcatcagcttggacgaggccaaaggcattacgtactgtcgtaaaggctaccagttcatcggacactcgaaagttatccagaaggcgattaacaatagccgtctgaaaaaacgcgggttaacgtccgcgctggatcattatctgaaagtgcagaccgtcatttga

SEQ ID NO: 94 - DNA, 1317 bp, synthetic construct
  source 1..1317: mol_type = other DNA
atggctagcgcatggagtcatcctcaattcgaaaaatccggaatggagctgttgacccagattttgtccaacagtaatctcaacgaagcatacaaaaaagtctatcgcaatcagggtgcgagcggggtggatggtgtgaccattaacgagctgaaagagcaccttcgtgagaataaacacaaactgctcagcgaaattcgcactcgtaagtataaaccacagccggtaaaacgtgtggaaattcctaaagcgaacggtggtatccgcaaacttggaatcccaacggttgtcgatcgtgtcattcagcaagccatcaaccaggtgctgacccctatctatgaagagcaattttcagatagtagctacggtttccgcccgttgcgtagcgctcaaggtgcggtcttacgctcattagaattgattaatgatggctatgattgggtggtggatatcgatctggaacgcttctttgatacggtacatcatgaccgtctgatgaatatcatttctcgcaccattaaagatggcgacgttatctcactcattcgtaagtttctggttagtggcgttatgattgacaataagtacgaagacacgattattggaacgccgcagggcggcaatctgtccccgctgttaagcaacatcatgcttaacgaactggacaaacaactggagatccgcggcctgcactttgtgcggtacgccgatgattgcatcattctggttaaaagtaaaaaaagcgcagaacgtgtaatgacttctgtgacgaactttatcgaaaaaaaattaggcctcaaagtcaacgcgaccaaaagtaaggtcgatcgcccgaataacattaagttcttgggatacggttattactcggactttaaagaagggaagtatcagctgaagccccatgaaaaatcgattcaaaaattcaaacgtaagcttaaacgtttgacaaaacggtcgtggtccgtttctttagactatcggctgctgaaaatccggcaggtaattatggggtggattcagtactttaagtatggtaaaatgaaaacaaaactgcgtggtattgactctaaactgcgcgctcgcatccgtgttgtgatctggaaacaatggaaggtgccgaagaagcatatctcatccttaattaaactcgggattctgaaagatcaggccaaaggcattacctattgccgtaaaggctatcagttcatcggccatagctgtgtaattcaccgtgcaatctccaattcgcgcctgaaaaaacgcggcctgactagcgccctggatcattaccttaaagtgcagaccgttatttga

SEQ ID NO: 95 - DNA, 1314 bp, synthetic construct
  source 1..1314: mol_type = other DNA
atggctagcgcatggagtcatcctcaattcgaaaaatccggaatggaattactggacaagattttggaacgggagaacctcaacaaagcatacaaacacgttaaggcaaacaaaggcgccccgggtgtggatggagtgactgttgatgaagcatatgaaaacattcgccagaataaagaaaaatggctgcatcagattcgtaaacgtacctacaaaccgcagcctgtgcgtcgtgttcagattccgaaagaaaacggtaaaatgcggaatctgggcattcccactgtgtttgatcgtattattcagcaagcgatggtacaggtactgagcccgatttttgaagagcaattttccgaaacctcttacggcttccggccaggacgctgttgcgaaaacgcggtggtaaaagcattagaatatctgaatgatgggtatgaatggatcgttgatatcgatttggaacgcttcttcgataccgtggatcaggatcgtctgatcaatattatcatgcgcacgatcaaagacggagatgtggtgtcgctgattcgcaagtatcttagtgccggcgtaatggacaaaggcgtcaccaaagcgaccgagaaagggacgccgcaaggtggcaatctgtcccctttactgagcaacattatgttaaacgagctggacaaagaactcgaagcgcgtggcctgcgcttcgtccgttatgccgacgattgtattatccttgtcaaaagtgagaaagctgctaatcgcgtgctggagtccatcacgaagtacatcgaaaagaaactgggtctgaaggttaatgctgaaaaatcgaaagtgacgcgtccgacgaaaacaaagtatctgggttacagcttctggaaagatacaaaagggaagtggaaacccaaaccgcacttgaaatcttatcagaaaattaagcgtaaacttaagcagctgacctgccgccgtatttcaatctcacttgacgaacgcatcaagcagattaattacgcgattcgcggctgggtcaattattttcgtatcgcaaacatgaaaaatgcgatccaagagatcgacgagcacctgcggactcgtgttcgtgtgatcatttggaaacagtggaaaaaagctagtcgcaaagaaaaagccctgttacaactgggtgttaaaccagatattgcccataaccttgcgaacaccagcaaaggctatcaattggtcgccaaaaccgactggctcaaatttgcgatcaacatcgaacgtctgcgcaagcgcggtttgatttttctcagcgatcagtaccagaaagttcatgtcgagatttga

SEQ ID NO: 96 - DNA, 1434 bp, synthetic construct
  source 1..1434: mol_type = other DNA
atggctagcgcatggagtcatcctcaattcgaaaaatccggaatgaatgcggaaaatctgattgatgaatcatgtcctcaacgtacgagtgcggaacatgaaaaatacgccggggcgcagtccgccgccccgcgtgaaagcgaagctgaagatcgcgcggacctgctggagcgtatccttgatcgcgacaatatgaatgaagcgtttaaacgcgtgcgcgcgaacaaaggcgcgccgggcatcgatggtatgaccgttgaggctgccttaccctggctgatcgagcatggtaaagaactgattgacagcctgcgtgacggcacctataaaccgcagccggtgcgccgcaaggaaattccaaagcctgatggtggcatccgtaaactgggaattcccaccgtgattgatcgcatgattcagcaagccatcacacagcagctgaccccgatctacgaaccgatcttttctgacaacagctatgggtaccgtccgcaccgcaatgcgcagatggcgatccgcaaagcaaaagagtatgcagacgaaggctacaccgtggccgtcgaaattgatctgaccaagtattttgacacgctgaaccacgatctgctcatgaacactgtccgtgaagaagttaaagacaagcgcgttctcgagttaattaaaaaatacttgaaatcaggcgtcatggctaacgggctgctgatcaaaacagaagaaggttcaccacaagggggcccgttgtccccactgttggcaaacatctatctgaataagtatgatcatgagatgactcgccggggcgtcaaggaaattcgttatgccgatgatatcgttttatttgccaaaagtaaacgggcaggagaacgcctgctggagtcttctcggcgttaccttgagaaaaagctgaaactcaaattgaactcggagaaaagcaaagtagtaagcacgtatagtccgcgtaagttcaagttcctgggttatgcactgggcaaaagtcgccaaggtaccttcattcgcatccacgctaaagcgctgaagaaagcgaaagagaagttgaaagagctcacgtcgcgctcccagggtcgtaaaatttgcgaggtgtttgcccgcctgaaacgcttcgtgaacggttggattaattactttggaattgcgcggattaaaaaaacccttgaagattgggatggctggttgcgccgtcgtattcgtatgtatatttggaaacagtggaaaaaaactcgccggcgtaaagaaaaccttatgaaactcggcgtacctgaatggcgtgcatgcgaagccgcgtactcccgtaaagcatattggcgtagcgccaaacatgcgtcagttcattcggctttaacgaatgaacgtttagctcgtgcaggttattacagcttatctgaacggtacgaatcgctgcacctttatgattga

SEQ ID NO: 97 - DNA, 1422 bp, synthetic construct
  source 1..1422: mol_type = other DNA
atggctagcgcatggagtcatcctcaattcgaaaaatccggaatggttcgctcacgtaaagaacgtatgcgtgaagaagataaaagtcgccccaacacgcgtctgtgtgagcaattaattagtctggcaaatattcagcaggcggtcaagaaagtaatgcagaataaaggttcagctgggattgatggcatggaagtgacggagcttccgtcgtatcttgaagcgaattgggccctgattcgtgagcaaattgtgacgcgtacttacaaacctaagccggtgctgcgccgtgagattccaaaggataatggtggcatgcgcctgctcggtattccaaccgcggtagatcgtgtgatccagcaagcgttggtccaggttctgaccccggtctttgaacctaccttttctgacttttcgtatggatttcgtccggggcgtagcgccgaagacgccgtgcgcctggctcagacctatatgagcgaagggtacaagcacgttgtagatcttgacctctcgaagttcttcgatacggtggaccatgacatcttaatgggcctcatcgacaagcacatggatgataaagacgttcgtcgtctgatctatgtctatttgaaaagcggtgtcatgacgaacggctccatggccgtgaccgcgctgggtaccccgcaaggcggcccattaagcccgttgttatctaatgtttatctgacaccgtacgatcgggaattggagaaacggggtctgcgtttcgtccgctacgcagacgattgcaacatctttacgaaaagtaaaatgtccagctatcgtgttcgcgactccgctaagagttatcttgaacggaaactgaaactgaaagtgaacatggagaaaaccgaggcgcggcgtgcagtcggcagtacatttctgggtttcacttttcgcacttatggcaaacgtggtaaacttgggatgacagtgccccatgaaaaaaaactgaaaaagctcgaggatcgcattcgtctggtgaccaagcgcaatcgcggcgtttccattggcatggttattcgtgatctgaactcaattttgcgtggttgggtaggctactttgcccgctctgcaattaaaaattatttggaacgtctgatggaatggatccgccgtcgtatccgccagtatctttggaaacaatggaaaagcggaaaaaaccgcaaacaccgcctgcgtcagctcggtgtagatgaatggaagctgaaaaaatggaaactggggtcgaactcttactggaaaatggcgggaaccatgaactacctgatcgacaaagaatcaattcatggccgctatggtctggttgatatcttaggatattacaataaactgcatgcccagcggatggaaagcgatggtatcgtgttagatgtgcgctacaacagcttattcggctga

SEQ ID NO: 98 - DNA, 1347 bp, synthetic construct
  source 1..1347: mol_type = other DNA
atggctagcgcatggagtcatcctcaattcgaaaaatccggaatggaattgatcgaagtgattctgagtaaagaaaatctgaaccgggcgtataagaaagtcgtggccaacaaaggtgcatccggcgtcgatggcgtgggggttgaagagctgggggactatattcgtgaaaacaaagatgtaatcattacatccattcgcaatcgtacctacatgccgaaaccggttcgtcgtgtgtacatccctaaagaaaatggcaaacagcgccccctcggcattccgacagtgttagaccgcacgatccagcaagctatcgctcaaccaatttgggatatctatgaagaaatcttctctgaatatagctacggctttcgcccaggtcggtcgtgccatgacgcgatccgtcaggccctgtactacctgaatgacggatatgagtgggttgttgacattgacattgagcagttctttgataaggtcaatcacgataaacttattcagatccttggggaacaagttaatgattcgacgaccttaaacctgattcggaagtacctcaaagccggtgtaatggagaaaggcctcgagaaagcaactatcaccggtgtacctcagggtggaccgttaagcgttgtatgctctaacatctatttggataaactggataaggaactggaaaagcgtggcttgcgcttcacccgctacgcggatgatgtcctgatttttacgaaaagtgaaatggctgccaaccgtgtgatgaaaagcatccgctcatggctggaacgtaaactgtttcttaaagtcaacggcaccaaaaccaaagtggtacgtccaacgcgctcgaagtatcttggttttacttttgtgaaaaattcaaccgagtggaaagtgcgtccgaccaatgagaaaaagaaaaaactgaagaagaaactgagcgagtatcttaaacgcggcaaagcggtagcacgtcccttagcggttactattaaacgcgtcaacgaaattgttcggggctggattaattactttcgcattggtatgatgaaacagttcatgcaggagctgggcgaatggttgcgccataaaattcgtgtgattgtcgtcaaacagtggaaacgtccgaaaacgatctatcggaatctctcttatctgaattggaagtataagatcggttgtaaacaagaagaaatttttaaagtggcgaactcacgcctgggttggtaccgtcgctgtggaatgagcgtggttaacttcatcatctccaaagacttgctggaaaaccgtattaaggatggggtgggcctgctgaacccgttaagttattatctggttaaagtgggtatttga

SEQ ID NO: 99 - DNA, 1461 bp, synthetic construct
  source 1..1461: mol_type = other DNA
atggctagcgcatggagtcatcctcaattcgaaaaatccggaatggacgcggagcgtcaacagggtcgcgcctaccagctcactttcaactttgaaggtgacgcggagacgctgcggcatgatcagggcggcgatgacggaattggtaccgcacgtcccgaagaaccgcagacaagcactgcgtccgatccagcacgcgctctgacggagcgtctgatggaagaagtgacgcgcccggagaatcttaatcgtgcgtaccgcaaagtgaaagccaacaagggcgcccctggtgtagacggtatgaccattggcgaccttcgtgcgtggattgctatgcataaagaagaactcattgccagccttctggatggctcatatcgcccgcagccggttcgtggagttcagatcccgaaaccaggtggtggggtgcgccaattaggtatcccaaccgtggtggaccgtctggtccagcaggccatccttcaggtgctggagccgttactggatcccaccttctccccttcatcatttggctttcgcccaggacggggcgcgcatgatgcattgaaacaggctcggcagtatgtcgcggacggacgcgtgattgtcgtcgacgtagatctggaaaaatttttcgaccgtgtcaaccacgatatcctgatggcacgcctggctcggaaggtagccgatcgtcgcctgttaggcatcattcgccgttttctgcaggcgggcttgatgcaggaaggtgtttgcgtggctcgccacgaaggcactccgcaagggggcccgctgtcgcctctgttagcgaacttgctgctggacgatcttgataaagagctggaacgtcggggtcatcacttctgtcgctatgccgacgattgcaatatctacgttcagagcaaggcagcggggcaacgcgttctgggttccgtaacccgtttcctcgaggtggttctgcgcctgcgtgtcaatcgtgataaaagtgaagttgcgtacattgaagaacgtaagttcctgggttatcgcctgctcagcggcggtcggctggggattgcgccgaaaagtctcgagcgtgcgaaggatcgtattcgccagattacccgccgtaatcgcggggtaagcgtggatcgtatgacctcggaattaaactcgtttctgacgggctgggttagttattttcgtcatgcagcatgtaaaagtcaccttacagaattagatggctggatccgtcgcaaactccgttgcgtgcgtctgaaacattgtaaacgctctaaaacgttggccgattttctgggctctcacggcgtcgcccaacatacggcatgggtgaccgcactgtctgggaaaggctggtggcgtttgagcggatccccggctgcccatcaagccatggatcaacgctggtttgcgtcgttgggtttaatcaacctggctcaccgtcatacaaccttgaaccgttga

SEQ ID NO: 100 - DNA, 1515 bp, synthetic construct
  source 1..1515: mol_type = other DNA
atggctagcgcatggagtcatcctcaattcgaaaaatccggaatgtccaaagccgagtatcggcagctgacatttgcgttcgctgactctcctcagggggccggtccggcggctctgaccgacgtgtcggtcggtaaagcttggctggccttaactgcggaagttaaggaaggcaatgattccgccgcatggaccgcagacacgggtcgtctgctggagtcggcgacgagtgccccaaaccttgcacaggcgttgttgaacgttgcacgcaacaaaggcgcggccggtgtcgatggccgtagtgtggatgaagtagttgccgccggcccgcgtttactgccttacctgcgccgggaactgctggcggggacctatcgtcccggggatatccgtcgtgtgtggatcccaaaacccggcggcggtcagcgtggcctgggcattccgaatgtggtcgatcgttgggtccaacaagctgtgctccaagtgctgcaaccaattttcgaaccgacctttcatgcatctagccatggcttccgcccgggccgcggagctcagactgcaatcgatgaagctaaaaaatacctggcagaaggtttctgtttcaccgttgatatcgatctgagcaagttctttgaccgtgttcatcaccagcgtttgctcaaccgcctcgcccaacaggcgtcagacggccgcattttgaaactggtgcaccggatgctgaaggcgaaagtggttctgccggatgggacgcgcattaccactgaagagggagcgccgcaaggtggccccctcagccctattcttagcaatattgtcctggacgagctggaccgtgaattagcacgccgtggacttcgcttcgtgcggtatgcggatgattttagcgtatttgttcgcagtgaacgcgctggtcgccgtgttatggatagtatccgcaagttcatcgaagggcgtttgcgtctggaagtaaacgaagagaaatcctcagtctcacgcccgaacgatctcacgtttctgggttttcatcttggtaagagtccggacggcaaagtgaccgtcaccccaagccaacgtacaaaagaacgtatggacctgcgtattcgcgaactgacaccgcgtacctggggccagtccgttgccgcttgcattgaaaaagccaattcgtatcttcgcggatggtttggttattttcgtctgtgcacggaagaaggtgtgctcagctttggccgttttgatgcacacatccgccgtcgcatccgggcggtaattgtgcatcagaaaaaacggcctcgccatctttatcgtcacctgctggatcgtggggtatcttgtggaatggcggcgaaagcggcctttcagcgccgtggtttgtggcatcgctctatttcgttcggcatgcacaaagcctacccgaatgcatggttcgcggatcgcttaatgtcattgaaagaggagtggcagcgtttacacccgccagagcaggtgagctacaagcagttattactgtttgagtga

SEQ ID NO: 101 - DNA, 1458 bp, synthetic construct
  source 1..1458: mol_type = other DNA
atggctagcgcatggagtcatcctcaattcgaaaaatccggaatgggggcaggggtgcccgaaaaaaagattgaaattagcgaagtcgacctgcatggtggaagccgcaaactgccgcgtggacgtatctctggtgcgaatttccctggcaccgaggggcagccggatccacggaaaccagatctgattgaaatgatgctcgaacgtggtaacctgttggaagcattgcaccgcgtggaatcgaatcgtggtgctgcaggggtggacggtttaaccgtgtcgcagctgcgccagtatcttcgcgttcattgggcaggaattaaggaacaactgctgaaaggcgagtatcagccgcgtccggttcgtcgtatggacatccccaaagcgggtggcggtacgcgtatgctgggcattcctaccgtactggatcgtttgatccaacaagcgctgcaccagatcttaagcccgctgtgggagccgtggttcagtgcgcacagttatggttttcgccctggccgttccgctgcgcaggccatcaaaacagcccagaagcatgtgcagtctggccatcgctgggttgttgatatggacctggaaaaatttttcgatcgcgttaaccatgatgtactgatggcgcgggttgctcgccgggtcaaagaccagcgtgtactgaaactgatccgtcgctacctggaatcaggcattatgttagggggcatggtggagcagcgtacagagggcacaccgcaaggcgggccgttatccccgctgctgtctaatatccttcttgacgacctggataaagagttggaacgtcgccgccataagttctgccgttatgcggacgattgtaacgtctatgttggtagccaacgcgccggagaacgtgtcatgaaatccctgacgcaattcctgcaggcaaaactgaaattaaccgtgaacccgaccaaaagtgccgtcgataaaccatggaaacgtaagtttctcggcttcagtttgactgcagaacgcggtattcgtattcgcgtggcgactccgtcagtcaaacgcctgcaggataaactgcgcgccaagtttcgtgagggccgtggtcgcaatcttcgtacctttattgagggcctgaaaccgcttctgcgtggttgggccaactacttttcagtagcggaaactcgtcaggtgtttgagaaattagatgaatggatccgccgtaaacttcgttgcatggaatggcgcaagtggaaacgccctaaaacccgtctccagcgtttgacggccttaggcttagatcgcgaacgggcgcggttgggcgcctttaacggtcgtggcccatggtggaacgctggcgcttcgcacatgaatgcggcactccccacgagctactttcacaaacttggtctgattctgctcacggaagaagtggattggcaaaccgccctgcggaccgctcgcagcctctga

SEQ ID NO: 102 - DNA, 1437 bp, synthetic construct
  source 1..1437: mol_type = other DNA
atggctagcgcatggagtcatcctcaattcgaaaaatccggaatgcggaccgatgacgccgaagcatatgtttcggcggcctcgacggggaaaggccgtcgcaaccgcttaggttcgggtgccggagcagaagtgcggacggctgctgttggtcgtactaaacccgaggcgctccgcctgatggaagcggccgtcgagcgtagtaacatgctgtgctcctacgaacgcgttgtgaaaaataaaggggcgcctggtgtggatggcctgaccgttgctgcctttaaaccttggttgcaagctcactggccacgtgttcgtcaggcactgttggcaggtgagtacatgcctgcggccgttcgcaaggtcgaaattccaaaaccgcagggcggggttcgtatgctggggattccgacggttttagatcgtctgatccagcaggcattacaccaggtcctgcaaccgctgtttgagccagagttctccgagtcaagctatggcttccggccgggccgcaacgcacatcaggcagtaaaggcggcgcgcgggtatgtcgctgaaggcaaacgttggaccgtggaccttgatttggaaaaatttttcgaccgcgtcaatcacgatgtacttatggcacgtgtagtgcgtaaagtgaacgacgagcgggtaagcaagcttattcgtcgttatcttgaagcaggtctgatggaaggtggagtggtgagcgcgcgtactgaaggcaccccgcaaggcggtccgttgtcccccttactctcgaacattttgctgacggatctggatcgtgaactggaacgccgtggtcatggcttttgtcgctatgctgatgactgtaatatctatgtaggcagcaaacgttcaggccagcgcgtcatgcgtgcgatcacagcgtttctggaacagcgcctgaaactgaaggtcaatgcggctaaaagtgccgtggcccgcccatggcaacgtaagttcctggggtactctatgacctggcacaaaaagccgaaacttaaaatcgcgcatcaatcacgtgagcgtttcgccgaaaaagttcgtcgcacgttacgtgaagcccggggtaagagtctgaaacgcgcggttgaacgcctcaacccggtgctgcgtggttgggtggcgtactttcgcctgaccgaagtaaaaggtgtgctcgaagaactcgatggctggctgcgccggaaactgcgggccctgctgtggcgtcgttggaaacgcaactacacccgtgcgaaaaatctgatgcgccgtggtttaagcgagcgtcgcgcgtggctgtcagcaacaaatggccatggaccgtggtggaatggcggcagctctcatatgaacgaagcctgcccgaaaagttggtttgaccgcatgggacttgtcagcttattggatactcagcgtcgcttttcttccgtgtcttga

SEQ ID NO: 103 - DNA, 1446 bp, synthetic construct
  source 1..1446: mol_type = other DNA
atggctagcgcatggagtcatcctcaattcgaaaaatccggaatgaccactgaaaatcgtcgtaaggaagaagcgaaaacggaagaatcaggccggaatccggtgctgcctctgaactcggccatggttgatgaaactaaacgggaagaaagtttactcccggataaccaacggtacattccgattcctaaaattgaaggagttgtttcggattataatatccaagaggcgacgaaagctgtgattcgtaacaaaggggcgccgggaattgatagtatcaccacggaagagatcgagggcattctgcagaaagaatggcccaagattaaacaagagatcttagacggcaagtaccgcccaagcccagttcgtcgcgttgaaatcccaaaaccggacaaaaatggcgtccgtaaacttggcatcccgaccgtcatggaccgtattattcagcaagcaatctaccaggaactgatgtttacattcgaggcaatcttttctgagaatagttatggttttcggcgttcccgcaatgcgcagcaagctgtgctcaaagcgcaaggatatatccaggaagggtacgaatgggtggtcgacatggatcttgagaaattctttgacaaagtaaaccacgatattctcatggccaaagttgcgcgccgcatcaaagataagaaaatcctcttactgatccgccgctacctgcaggcgggcgtgttagaaaacggtctggtaaagccttcggaagagggtacaccgcagggtgggccactttccccgttgttgagcaacattatgttggatgattttgataaggaattagagcgccgcggcctgcggttcgtgcgctatgccgatgattgtaacatctacgtgaaaactgaaattgcaggacagcgcgtgatgaaaagcgctatcaagtatctgacaacccgtctgaaactgaaggtaaacgaagaaaaaagcgccgtcgcacatccgtgggagcggaagttcctgggttttaccttcaaaaaagaagaaccggggaaaattgccattcatgagtcccgtatcaaacgtttgaaagacaaaattcggggtctgacgaaaaaaatgcgtgatggtaatcttacggtaagcattcgtaagtttattatgcctattgtccgcggctggaccaattatttcggcatcgccgaggaacagggtatttttgcgagcctggacggttggattcgccgtaaaatccgcggcattcagtggcgccagtggaaagaaccccgcacccgcttcaaaaaactgaagtcactgggcattaaagaacagaccgcgcgtaaccatggttattcttcgaaagggccgtggaaaatggcacgttcccacgtgatgcacaaagtcttttcaaacagcaccatcgaaagtatgggctatattcccatggccaagctggtttgcgctcgttcttga

SEQ ID NO: 104 - DNA, 1272 bp, synthetic construct
  source 1..1272: mol_type = other DNA
atggctagcgcatggagtcatcctcaattcgaaaaatccggaatgtacgaagcactgcggcgcgtcgaaggcaataaaggtgccgcgggcatcgatggaatggaagtaaaagatcttcgtccgtatctgaaagcccattggcaagaaatcaaagggcagctgttagaaggtacctataagcccaaaccggtgcgtcgtgctgaaattccaaaaccggacggcggtgtccgctttctggggattccttgcgtgattgaccgcttaattcagcagtcactgttacaggtactcacgcctattttcgaccccggttttagcgaacactcatatggttttcgtccgggacggggcgcccatcaggccgttcagaaagcgaaagaatacgtcggcgagggttatacctatgttgttgacatcgatctggaaaagttcttcgaccgcgtgaatcacgatgcgttgatggcgcgcgtggcacgcaaagttgaggataaacgtgtactcaaacttatccgtgcctaccttaatagcggcatcatggtcgatggcgtgtgcattcgcaccgaagaagggaccccacaaggcggtccgctcagtccgttgctgtccaacgtcatgctggacgatcttgataaagagctggagaagcgtggtcatcgtttcgtgcgttatgcggatgattgtaatatctacgtgaaaagtcaacgtgcaggagaacgcgttatgggtaatgttaaacgttttctgggcgagcgcctgaagttaaaggtgaatgaggcaaaaagtgctgtgggcaaagtaaacgcccgtaagtttctggggtttacactgtctagcggcaaacgctcgcgcatccgcatcgcgagcaaagctctggagcgtctgaaagatcgcatccgcgaattgactcgtcgttcttggggtattcgtatgggcgaacgcattcggcggctgaacgtctatttgcggggctggattggttactaccgtttggcggaaagcctgtccgtgttgaaccaattagacggctggatccgccgtcgcctgcgcgtttgcttattgaaacagtggcgcaaaccgaaggcgcgttggcgtaaccttgtgaagcttggtgtttctgaggaatgggcctatatgatttcggggtcgcgtaaagggtgttatcgtctgtccctgactcaccagctgaacaaagcgctgggactcgaatactggaaaaaacagggcttactgtcactggctgaaacgtatctgaacattcgtattgcactctga

SEQ ID NO: 105 - DNA, 1362 bp, synthetic construct
  source 1..1362: mol_type = other DNA
atggctagcgcatggagtcatcctcaattcgaaaaatccggaatgaccgaggcagttggggaaggagtttgggagcaggtatttgaacgcaaaaacctgctctcagcattaaaacgtgtggaagccaacggtggcgcgccaggtgttgatggcatgactgtcgaggccttgcgtccatatctgaaagctcactggctggaagtgcgcgcagctctggactgggggtcttaccgcccttccccggtccgtcgtgtcgaaattggtaaaccggatggtggcgtacgcctgttagggattccaacggtagcggaccgcctgattcaacaggcgattggacaggtcctgacgccgctctttgagcctgtgttcagcccgcattcctatggatttcgtccgggacgtcgtgcccacgacgctgttgaagcggcgcaaggccatatccgtgaaggctacacctgggtggttgatatcgaccttgaaaaatttttcgatcgggtgaatcatgacaaacttatggcgcgcgtcgttcgcgttgtaaaagataaacgtgtgctgaaactgattcgtcgctaccttcagagcggtgtgatggttaatggtgtcgtgatggagacagaagagggcacgccccagggcggtcccctttcccccttgctggccaacattatgctggacgatcttgataaagaactcgagcggcgtggccatcgctttgttcgctatgcggatgattgtaatatctacgtccgtacggaacgtggcggcgaacgcgtgatgaattcggtgcgtggctttctggagaagaaactcaaattgaaggtgaacgaaaagaaatcggccgtggcacgggcaggccagcgtaagttcctgggttttagctacttctaccgcaagggcgaagtgctgatccgcgtagctgaacaagctcaacaacgcttgcgcgaaaaattacgcggcctgacccgtcgtacccggagcggccgtctcgaagaaattatccagcagctgaaagaatatatgcgcgggtggatgggctattttcgtttagcagataccccgagtgtattcgcggggttagatcagtggctgcggcgtcgtctgcgtcaattgctgtggaaacgctggaaacggggtactacgcgttggcgtgaactggtgtcgttaggtgttcctcgctctctggcgggacttggtgccactgggtcaagtccgtggcgcatggccgccaccccagtcgttccgatggctctgagtaccgcgttctgggacgcccagggtctgtgtagctttaccgagtattatcatcagttgcactggccgcgccgtacagcgggttgcggtccggcatgcccggtcgtgtga

SEQ ID NO: 106 - DNA, 1497 bp, synthetic construct
  source 1..1497: mol_type = other DNA
atggctagcgcatggagtcatcctcaattcgaaaaatccggaatgagcagcctgcgtaacgagcaaggccgccagaaactgtcagatcgcgaaaccggtgaaccgacacagcaggtcaaacctgaaggtgaagtgcagtcagcggagccttttccggcgcgcgatgatggcaaaagtgacgagagcgacggcctctctttatcgaaacccgtgtgggaagcagtgttcgcccgcgcgaatctgtttgcagcgctgaaacgcgtggaatcgaataaaggtgcagccggggtagatgggatgaccgttaaagagctgccggcataccttaaagcacattggttagaagttcgcgacgctttggaaagcggcaagtatcgcccgtccccggttcgtcgcgtggaaatccctaaaccggatggtggtgtgcgtcagctgggcattctgaccgtgctggaccgtctgattcagcaagccatcgctcaggttctgaccccaatgtttgaaatggcgttctcccccaactcgtatggcttccggccgggccgctcggctcatcaagctgtagaacgtagtcaggaatacattcgggaaggatacgactgggttgtcgatattgatctggaaaaattctttgatcgcgtaaaccatgatatgttgatggcgcgtgttgcccgggtcgtgaaagacaaacgtgtattaaaactgattcgtgcataccttgaaagcggcgttatgttaaacggagtggttatggatacggaagaaggtacccctcagggcggtccgttaagtccgctgctttcaaatatcatgctgaccgacctggatcgcgagcttgaggaacgcggccagaaatttgttcgttatgccgacgattgcaatctgtatgtcactccagcactggccggcggagcgcgcgagacggaacgtgcgggcgaacgtgtgctggagagcgtaaagcagtatttggagaagaagctgaaactcaaagtcaatcccaaaaagagtaaggtggagcgcgccactcgtgccaagtttctcggtttcagtttttggaaacgtaaaggagaagtttttattcgcttggcgaaacgtaccaaagaacgcttcgcggagaagatccgttaccttacgaaacgtacccggtcagggaaaatggaagatatcgtctccgaagtaaaccgctacactcgtgggtggatcgggtattttcgcctggcgaccacaccatccgtgtatcaagaaatggatgaatggattcgccggcgcttgcgtcaaattcagtggaaacgttggaaacgtggtcgtacgcgttaccgtgaactggtccgcctcggtgtgccgccaaaacgtgcagctttaggtgccgtcggcacgtctccgtggcgtatgtctcacagcccgatcattcacgaggctctctctaatgcgttttggcgcaacacgggcttggagtccatcacagaacggtataaccaattccgttatagccactga

SEQ ID NO: 107 - DNA, 1443 bp, synthetic construct
  source 1..1443: mol_type = other DNA
atggctagcgcatggagtcatcctcaattcgaaaaatccggaatgaagtcaggtggtgaatggcgccagcagctgttgccgtttgaagcggaagcaccgaccggtggcgcgggccaaaactcagcagggccggcaggtgtcagccgtgctccatggcgccagccggatcctgcatcggctcgcccgacgctgctgcgtgaaatcgttcgcgaacgcgttcttgaggccgcttggaaacaagtgcgccgtaaccgtggcgcgccgggtattgacggaatgcgcgtaggcgattttgaagaatggattggcgtacacggtgatcaggtgcgtgccgagattctggcaggaacgtatgaaccgcagccagtacgtcgtgtggaaatccccaagcccggcgggggcgttcgtttgctgggtgtgccgacggtgttggaccgcgtaatccaacaggcccttgtcattgttctcacccctatcttagacccgacctttagtgagagcagctatggcttccggccgggtcgtagtgcacatggagcggtggcggcagctcgtcgccacattgcggatggttaccgctgggtagtcgaccttgatctgagcaagttcttcgaccgggtcaaccatgacgtgctggttgatcgtttatggaagcgcctgggcgacgggccgttactcagtttgattcgtcgctatcttaaagccggcgttctgatcgagggtgtggtggtcgagagtgttgaaggcactccccaagggggacctctctccccactgttatccaacgtcttactggatgagtgggatcgtgagctggaacgccgggggcatcgctttgtgcgctatgctgatgattgtaatatctacgttcgtagccgccgggcgggcgaacgtgtgctggcatcctgccgtgattttctggagcgtcgtttgcgcctgaaagtgaatgaagaaaaaagcgcggttgcccgtccgtgggcgcgccaatttttaggctactccgtgaccaacggcaaaaaaccgaagcagcgcctggcgaaacgtagcgtcgtccgtctgaaagaacgtgtgcgcgccattacctcacgttctcgggggatttcgctcgagcagatgttgcgcgaattgtcccggtatcttcgtgggtggtcaggctacttccgccggattgaaacaccttcggttttagaacagctggattcttggatccgtcgtcgtgtgcgctcgtttctgctgaaacaatggaaaccaggtcgcggacgtcgtcgtgcgatccagaaactgggtgtggatgacggctggcgtctgagtgcctctcgtaaaggtccatggcgcctgtctcgcggtaaagtaattagcgcggccctgccgaatgctactctggaacagcgtggcctcgtcaatcttaaacaggaatggaaacgcctcgccgaactgttctga

SEQ ID NO: 108 - DNA, 1290 bp, synthetic construct
  source 1..1290: mol_type = other DNA
atggctagcgcatggagtcatcctcaattcgaaaaatccggaatgaccaccgaatgcacgatggaagcgatgttcaattggctgaacctcgaggaagcactggaagccgtcaagcgtaataaaggggcggccggcatcgatggaaaaagtatcgctgaaactgagcaacacattgaagaatactggacccaaattgaagcgaaacttatggcaggtcagtatattccgtctcaagtgaaaggcgtgaaaattccgaaaccgaatggggagaaacgcttattgggtattcctaccgttcaggaccgtgtgattcagcaagccatgaaccagcagctgagcaaagcctttgaccgcgagttttcgatcaacagctacggcttccggccctatatgtcggcacagcaggcggttaaacaggcgcaactgtacgttcaacaaggcaaacactgggtcgtcgatattgatatctccgccttctttgatgaagtcaatcacgacatcctgctccatcagctgtcacagaaagtaacggacaagcgggtgcaaggcttaattcgtaagtaccttaaaaccggtattatgattgagggtaagctggaacgccgtggaaaaggcatgccgcagggtagtccgttgtcgcccctgctggctaacatctacctggatcgcttagacaaagaattggagaaacgcggactgagcttctgtcgttatgcggatgatacatccctgtatgtgagctctgaacgtagtgccaagcgtgtcctggaatcgttgacccagtggattgaaaaacatttgaaactgaacgtgaaccaatcaaaaagtggcacgggtcgcccatgggaaagccagtttctggggtttcgtattggtaaagatggcgaaatcggtatcgctccaaaaagtattgaacgctataaagaaaaagttcgtaaactgtgggatgctcgtcagtccctgacgtcaaaacagttaattgagcagtggcaaaagtattccatcgggtggtggaattattttaagcttgcgactaagcgctggaccatccggtgttgggtaggttggacgcgccgtcatattcgcaagtgcttctggcagcgctggcataataaaaaaggtcggctgaacgcgctccgtcgcctgggcgttagcgagtatcttcagaaaacagcatcgtcctcacgtggcgcgtggcgtatcgcgtctagccctgctctgcataaagcattaagcaacgcaactcttcgccgttacggcctcgacgtgccgccgttatctgccgcctga

SEQ ID NO: 109 - DNA, 1311 bp, synthetic construct
  source 1..1311: mol_type = other DNA
atggctagcgcatggagtcatcctcaattcgaaaaatccggaatgggcaaacagcggagcatgacgccacatcagccttctttactgatgctccgtattgttgagcgtaataatctgcagcgcgccctgaaacaggtgcaacgtaaaaaaggcgctccgggtgtggacggcatgacggttgaggaactgccggactacctgcgtgcccactggccacagttgcgtgagcaactggtgggtggtacctatcgtccgaagccggtgaaacgtgtgttgatcccgaaagctaatggtaaacaacgtaaacttgggatcccgaccgtggtcgatcggttcgtgcagcaagcgattgcgcaggtcttatcagagtattgggaaacgaagtttcatccggactcttacggcttccgcccccaacgcagtgcccatcaggcaatccgccgcgtgcaggcgtatacccgtgcagggtatcgcacggcggttgacctggatcttgaatcattttttgatgaggttaaccacgaccggctgatgcgtgctcttcatcgcacccaccccgacaccgatgttttgcagttagtaaaccgttaccttaaagcaccagtgtccacatgcgatggacgtctgtcttcggaaaaaggtgtgcctcagggcggtcctctgtccccgcttctggctaacattgtcctgaacgaaatggattgggaactcgaacgtcgccagttacgtttcgcgcgctacgccgatgattgtcagatcctggtaggctcccaccaggcgggtcagggtgtcatggcatcattgacccgctttattgaaaaaaccttgcgccttaaagtcaatcgtgaaaaatcggccgttgccgatgttcacgaacgcacatttctgggctttgtcctcacgcgccgtgatcaacgcatccgtgttagtgggaaagtactcgaaaaattaaaagcaaccgtgcgcactgtaactcgtcgcacccgtggacatagctttcgcaagattctggaagagctgcgccgctcgctgttggggtggaaagcatatttcgacgcaagcgaagtcctgagtcccctgaaagaactggataagtggattcggcgtaagctgcgttgctatctgtggaagcaatggggtcgtgcgggctatcgccgcctgcgtgaattgggcgtaagccgtcaactggcgtggaacacagctaaaagtgcgcatggcccatggcggattagccattcgccggccctctaccacgccctgccgacttcctacttccgtagcttaggactcccggagttagcggcgcggtga

SEQ ID NO: 110 - DNA, 1413 bp, synthetic construct
  source 1..1413: mol_type = other DNA
atggctagcgcatggagtcatcctcaattcgaaaaatccggaatgtcgctgaaacatgctatgcaccagatgctcggccaaccgggccgtgccaatgtgggggaaggcgaaccgcagctggatgtggtaagcgatgaagcatcattagcgggtcatacccaggaagggagtggccaggaagacttgctgcaacaaatcctgctgcgtgaaaacctggtgaaggcatggaagcatgttaaagccaataaaggtagcgcgggcatcgatggactgacgattgagcagactaccgaatatctcaaaacccactggtcaaaaattcgtgaagagttgctgtctggccaataccgccctcaagcggtgcgttgcgtcgaaattccgaaaccaggttccggtacccgtgaactgggtatcccgactgtggttgatcgtctcattcagcaggcgatgttacaggtgctgcagcccttaatcgacccgacattcagtaacttttcctatggctttcgcccggctcgctctgcacataacgcggttctgaaagccaaacgctacgtcgaggaaggttatcagatcgtcgtggatattgaccttgagaagttctttgaccgcattaaccacgatatcctgattgatcgcctgtcgaagaaaattccggataaaagtgtgctcggcctgattcgccgttaccttcaggcgggcacgatggtgaatggtgtagttatggaacgcgaagaaggcacgccacagggcggtccattaagcgcactgttagctaatgtcttgctggatgaagtcgacaaagccctggagcgccgcggtcataagtttgcacgttatgcggacgattgtaatgtttatgtacatagccaacgcgctggagaacgcgttcttcagtcattgcgctgcatctacgccaaacttcacctgaaagtaaacgaagctaaaactaccgtgggaacagtgttcgggcgtaagttcctgggctattgcttgcgtcgctggtcgggtgatacggtgaaaattgcggtggccaccaaagcattagagacattcaaacagcgcattcgtctgatcacctgtcgtgtaggcggtcgtagcatgattcaagttgccgagcgtctccgcgcgtatctgccggggtggaaaagctattttcgtttggcgcagacgcccactacctttaaagatcttgactcctggctgcggcaccgtctccgtgccatccaactgaaacactggcgtcgtggatctacgacctaccgggaattacggaaactgggggctacccatgagatggcgagtttgatggccgggggtgcaggccattggtggcggcattccaagtttaaccttaacatggtcctgaccgttgcgtactttaataacctgggcgtcccttggctgacgtga

SEQ ID NO: 111 - DNA, 1419 bp, synthetic construct
  source 1..1419: mol_type = other DNA
atggctagcgcatggagtcatcctcaattcgaaaaatccggaatgaaaaatggcgaggaaccgtccccggactctactcgtcgcctttcacgtccgggtcaagccgctgccgccccgtccgagaaaccatccccgagtctgtttccagaacgcatgatggaagtcatcgtggactctgcaaacatgcagcgtgcttgggatcaagtccgcggaaaccgtggggcgcccggacccgatggtgttacgctgacgcagtttcctgaatggtttcgcccgcagtgggccgtaattcgccagcagctgctcgatcgcacctacgagccgtcaccagtgcgtcgcaaaacaattgacaaaccggatggtggccagcgtcagttggggattccgaacgttctggatcgtctcattcagcaggcgattcagcaagtgctcaccccggtgtttgacccgggattttcggatagctcgcacgggtttcgtccaaatcgctcggcccatggcgcggctaaacaggtggaacgcacgattcgtcgcggtcgtcgcttcgtggtggacatggatctgtctaagttctttgatcgtgttcaacacgatgtgttaatgtcgcgcgttgctcgtaaagtgcgggatcggcgcttactgaaactgattggtcgctaccttcgtgcaggtgttatggtagaaggcgtcttgcagagcagccctgaaggtacccctcagggtggccccttatcaccattgctggcgaacatcctgctggacgacatggataaagagctggagcgtcgtggcttgccgtttgtccgttatgccgatgattttgtgattttcaccaaaacacggcgtgcggcggaacgcgttttcaacggtgtaaaccgctatcttaccaaggttctgcgtttagtggtcaatcttgagaaatcccggatccttccggcggacggggtagaatttctgggcttcgtctttcggggcgtcacaggtaccatccacgtgagcgaaaaaagcgttcaaaagtgcaaacgctggatccgtgaactgaccggccgctctcgcggcatcagtatgacccaacggttgggggaactgcgtcgctatttgcaaggctgggcaggctacttcgcactggcgaaacagatgcgtctgttcgaaaatcttgaccagtggatccgtcggcgtctgcgcatgtgcctgtggaaatgttggcgttttgttcggacgcgtgtacaaaacctcttagcactgggtgtacctcgccgccaggcgttccgtcatgctaaaagtcgtcagggcccgtggcatatggcgaagactattgccagcggagtcggtatgacgaatgcatggctgcatgatcaaggcctcgtgagcttaaagagtctgtgggttaaacgtgcacctctgcgccgtactgcctga

SEQ ID NO: 112 - DNA, 1311 bp, synthetic construct
  source 1..1311: mol_type = other DNA
atggctagcgcatggagtcatcctcaattcgaaaaatccggaatgaaaaaatggtattcgctgatcgataaggtgtaccgcctggataaccttaaacgggcttatcgcgcggttcgtgcaaataaaggagcgccgggtgtggacggtgaaaccgtcgaagcgtttggtcagaacctcgaggagcgcttacatcagttacatcatgaactgaaaacgggtacgtacgaacctcaaccggtgctccgggtcgaaattccgaaagcagacggcagcaaactgccgctcggcattccaacagtgaaagaccgcgttgtgcagcaggccttattgaacattatgcagcctatttttgaaccggattttcacccgtcgtcctatggctatcgcccgggtcgttcatgtcatcaggctgtggccaaaagtgagcgtttcatgaacaagtatgggttagagtatgtagtagatatggacctttctaagtgcttcgaccgcctggaccatgaactcattctggaaggcgtaaaccgtaaggtgtctgatggatctgttttgcgcctgattaaaaaatttttaaccgccggtgtcatgaaaaatggcgcatgggaagaaactgatattggctcaccccagggcggggtgttcagcccactgatcgctaacatctacctggatcgctttgatcaagatatgaaacgtcgcggtattcgcatcgtacgttacgcagacgatattctcatctttgcacgtactcaccgtgaggcccgtaagtatcagaaactggcgacggaaattttggaaagcgagctgaaactggttgttaacaaggaaaaaacccacctgacatccgtcaaaaaaggcgtaacctatcttggtttcatcatcaaaagtaagttcgtcagtatccacccaaaaaaaattaaaagtttcaaagatcgtatccgccaactgaccccgcgtaatcatggaattaacgttgaagaaatggttaaacgcctgaacccggttctgcgcgggtgggccaattattttcgtgtggcgaattgcaagatgcttttcctgcagctgatggaatggattcgtcgtcgcctgcgtatgaaacaaatgaaagaatggaaaagctggaaaccactgcacaaagcgttacggcgccgcggttacaaaggcgagtttcggaagatttcagtgacccgttggtgtaattcggctagccctttggtcaatatggccttgcccaattcctggtttaatgaaatcgggctgattaaccttgcgagctacaacgtgggcatcttgcaccatttttgggagtga

SEQ ID NO: 113 - DNA, 1329 bp, synthetic construct
  source 1..1329: mol_type = other DNA
atggctagcgcatggagtcatcctcaattcgaaaaatccggaatgggcgacactatgaccaaacgcaagcatcacagtctctatggccagatcctgcaacgcttagataccgcattcgcgaaagtgaaagcgaatcgcggcgcggcggggattgatggagagtccattgccgagttcgagcaagatcttgaagctaatcttgcacaactgaaacgcgatcttaaagaaaaaacgtacgcgccacaacccgtccgtcgtgtgtatattccaaaagccagcggtgggcagcgtccgttaggaatcccaactgttcgtgatcgcgtggtacagcaggccctgcgtttagtgctggaaccggttttcgaaccgctgttttgcgacagttcttacggtttccgtccgggtcgctctgcccatcaggcgctggaccgtgtgagcggccacctgcgtgaaggttataagtgggtggtcgattgtgatttgaaatcgtatttcgatacaatccctcaggaagcattgatcgatcgtgtggcagaagaagtcgcggatggaacggtcctgaaactcatccggtcgtttctccaggccggggttatgagtgaaggccagcttcagcgcaccatcgctggcacgcctcaaggtggcgtaatcagcccactgctcgcaaatatctatctgcatggttttgaccagctgatggaagatcgcggcctgcgcctgacgcgttacgcggacgattttgttattttatgccgcacccaacgcgccgctgaacgggtaatggggaatgtccagtcatacttggaaggccagctcggtctgacggttaaccgcgaaaaatccaaagtcgttcacctttccgagggctttgttttcctgggctatgagtttggaacctggggtcgtcgtccggggcctaaagccattctgcggttcaagcaacgcattcgtgaactgacccgtcggaaccagactattcccgtagataagatggtgcgtgagcaactgaacccgtatctgcaaggctgggcaggttactttggctatggccaggtccgtcagcgttttctggactacgataagtggattcgtcggcgccttcgtatggtccagctgcgctcgtggcgccatatgaaaggtttgcatcgtgctatgcgtcagaaaggttggaaagggccgctgccggcggtttatgtgaacatgcgtcgttggcgctcttcagttcacagcttagtgaactacgctttgggcccggactggattcgcggtctgggtttggtgagcttagtggactttcatcgtccgaccatggtaacagtgacccgctga

SEQ ID NO: 114 - DNA, 1215 bp, synthetic construct
  source 1..1215: mol_type = other DNA
atggctagcgcatggagtcatcctcaattcgaaaaatccggaatggggcaaatgctcgaggccatcgcagacccggcgaacctggccgcagcgtgggcaaaagtccgggccaacgccggtgccgctggtgtcgatggtcagtccattgcggcgttcgatgcggactcggaacatcagttagttcgtctgcgccggcgcttactgtctgcagagcgctatgtcccgccgcctgtcttacgtgttgaaatcccaaagccggatggacgtatgcgccccctgggcattccgaccgtggctgatcgcgtggtgcaacaagcaacgcgccaggtgattgaaccacactttgaagcggaatttctgccgtgctcgttcggctatcggcctgggcgctccgcacagcgtgcagctgtttggtgggtaaaagaagcgatccgccgcggtgatcgctgggtggctgaatttgatgtggaaggattctttgatcaccttagccatgcacgtctcctgcgccaggtcgccaaaaaagtagacgaccccgaggtgattgggctggtgcggcgttggttacgcgcgggcgtctttagcgccgaaggcctggttcccagcgtggcgggcaccccacagggtggtgttatttcaccgttgctggctaatatctaccttcatcgtttggacgtgaaagtgcgtgcggcgggtttccggctgatccgttacgccgatgatttcgttattctggctgaccggcggtggaaagtaaaagcggccgaccgtctggttcgcagtatcctgtccgatatgggactgtcagtatctgaagccaaaagtggtgtcgtccgtgtacgcgacggcttcgagttcctggggtttacaatccatggccgctttttgcgtccgcgtccacgtgcgttggctagttttaaagatcgcgttcgtagccgtacccgtcgtcaggcgcctgtgtcgatgagccagatgattgatcagcttaacccgttactgcgcggctggggcacgtactatgcgattggggacgtagtttcactctttgaggaccttgataagtggattcgtatgcgcctgcgtagcaaagcccgtaaacgcttcaaaagtaaaggcggtcctgatggccaaaagtggccgaataaagcatttgatgatttgggcctggtgcgcctcgaacaccttgcccgcactggtaagctgtctccggtttga

SEQ ID NO: 115 - DNA, 1203 bp, synthetic construct
  source 1..1203: mol_type = other DNA
atggctagcgcatggagtcatcctcaattcgaaaaatccggaatgaaaaaacgcaagtggtactcactggtggacaaaatttggaaattcagcaacctcgaggcagccttttctaaggtgaaagagaaccgcggcgccgcaggtatcgatcgtgtttcgattggtcagttcgaacgccagaagcagcaaaatcttctggaaatccagcgtctgctgcgcagcaaacgttatgaggctattcctgttcgtcgtgttgaaattccaaaaagtgatggccgttaccgtcctctgggtattccgaccgtccgtgaccgtgtcgtgcaacaagctacttttgcggtgatgtcgccgatttttgaaacgaagttcctggactgtagctatggttttcgtaaaggccgcaatacccatcaggctattgcaaaaatggaacagtatcgtaacgaaggctgcgaatgggttgtggaagcagacatcgaatcctttttcgatactgttaaccatgaattattgatcgatcaggtcgctgaagagattagcgatgggagtgtcctgaaactgatccgtagttggctgacggcgggcgcgtttaaaggcaccgaagtgattgagacaagcgtagggacgccgcaaggtggagtaatctcaccactgttagccaatatctatctgcatccgtttgatgtccagatgacagcattgggttttaaacttgttcgctacgcggatgactttgtgattatgtgccgctctgaagatgaagcggaacgtgcgatggaagccgccacccgtattctctcgggcatcaaacttcgggtgaaagcggcgaaaacgcgcatcgttcagttgagcaaggatgacggcatcgaattcctcggttttaccatcttcaaagagcacaaagtaccccgcactcgcgcagtagaaaatttcaaaagtcggattcgcctgattacccgtcgccaacgtccggctacccttcaggaaattattaaagagttaaacccggtggtgcgcgggtggggaaactattttaaaatcgccaacgtcaattggctctacaaaggcctggattcctggatgcggatgcgtctgcggtcctttttagaaaaaaagaagtcctacgaggcgaacaaacgcctggagaataaacacttctcggaagccggtttgaccacgctgtcatctctgattggatattga

SEQ ID NO: 116 - DNA, 1425 bp, synthetic construct
  source 1..1425: mol_type = other DNA
atggctagcgcatggagtcatcctcaattcgaaaaatccggaatggcatcccccgccaccgaatgcccggcgggccattcagcggtggcgacaaaaagtagcgcgggtcaccgtgttggtttttttgctgcacggcgcgctgctaagagtcagggccgccgccagggtcaggatgggcagcaacgcagtcccaaaccgtcatctgggaatgcccgcgcggaaggcccgcgccgtgtcaaacggaaagtgagctctctgatcgaccaggtgtaccggtgggaaaatctttatcgggcatggcgccgtatccgtcgcaacaaaggtgtgcacggcctggaccgcgttactatccgtaattttgaggcggattgggaaaaacaccttcgggagattcaacgtatgttaatggaacagcgttatgtcccaacccctgtccgccgcgtgtacattccgaaacccgccgatccgaccaaacgtcgtccgttgggtattccgatcgtggcggaccggattgtacaacaggcaatctttcaggttgtggatccactgtttgactcaactatgtctgatcggtcgttcggctatcgtaaagggcgtaaagcccacgatgccgtcgccgctctcatttccgatgcgaagcaaggctaccgctttgtcttggatgccgatattgccagcttcttcgatgaaattgaccatgatgtggtcatgagctgcgtgcgcgctcgtattgccgacggacgcgttctggacctgtttgaggcgtttttgaaagcaggtgtgtccgaggatggcgaagtttcagtaccggataaaggagtcccacaaggtggagtaatcagcccgtggctgtcgaatctggttctggatcatctggacaaggcaatcgaaaaggaaggctggcgccatgcgcgttatgccgacgatttcgtggttctgtgccgtagccgcgaagaggcacagcgtgcgctgaccgtagttaaagaagtcttagaaacgcttaaacttagcctgcatgaaacgaagacccgcctcacagattgtgagcagggcttcgaatttctggggttccattttcgccactaccgtctgggtattcgtgaatcgtctatcgaacgtttcaaagatcgtgtacgcgcgttaacccggcgctggcaaggtcgtaacgtggacgcggtgttggcagatcttaacccggtcttacgtggctgggcgcgttatttcggcgtggccgaggttagtctgacgtttcgctacctggatagttggattcgcatgcgcctgcgtggttttaagtacaaacgtcgttgttatcatgacaactggcgcttgccatcgaaacgtctgaaacgttggggcctgctcagcctgcagcagtgtcgccctcagttacgtctctcctatgctcgtgcagttgggccttga

SEQ ID NO: 117 - DNA, 1398 bp, synthetic construct
  source 1..1398: mol_type = other DNA
atggctagcgcatggagtcatcctcaattcgaaaaatccggaatgcaggaatctggtagtgctaaaactatgaccaatgatgaaacgactcgcccaaccgccgttgccggtctggatcaacccaaacaggcgggtaatatccgtgaccggtggggctggattgagcatagtgtgtggacggaacgtatgctgacccgcctcgaggcttctgagccgactacggtctggtatggcctgtgggataaagtacatagcgaacgtaacttggaagcggcgttttgggcagtttggcgcaaccgtggcgcaccgggcgtcgatgggcagaccgtccgtcagtttgaagcacaagaacaagctcagctggcgaaacttcgtgaagaattgcgtagcaaacgttaccatcgtcaaccagcccgtcggacgtggatcgcgaagcctggcacgctggagaagcgcccgctcggcattccggcagtgcgggaccgtactgtggaagcagctctgaaacaggtgttagaaccaatcttcgaacaggacttcgcggagcattcctatggctttcgcccgggacgtggttgtcgtgaagccgttaaacgtgtggaagcgctgttaggccaaggtcgggtgtggtgtgtagaccttgacttcaaaagttactttgatacaatccctcacgagcgcctgctgggcctggtacaacagcgtgttgtggatggttccgtgctggcactgttagctcaggggcttaaagccggagtactggaaaccctgaaaggctggcaacccacggaagttgggaccccgcagggtgcggtgatcagcccgctcttagcgaatctgtacctgaacccattggaccacgccatggcggagcgtggttgggaaatggtccgctatgccgatgatcttgttgtactctgccagtcccgcgaagaagccgaacaggcattggcatatcttcgccagtggagcggtgaggcgggtctgtcggttcaccctaccaaaacccgtattgtcaatgcccactcagaaggtttcgattttctcgggtggcatttccgcggcgggaagaaatggccgcgtaaaaagagcttgcagaaactgcgcgataaacttcggccgctgacccggcgtacaaacggtcgttctttagaagaaattattacaaagaccaaccgcattctgcgcggttggcacggctattttcgtgagtcgcatcctacgggcctgagcgggccggacggatgggtgcgtcgccgtttacgcgcgatgctgcgcaaacgtgaaaaacgcccgggctacggtctgagtgaggctgattcacgccgctggcccaatcgctggtttggagtccagggcttgttttcgctggagcatggatcatgcgcctatggctga

SEQ ID NO: 118 - DNA, 1299 bp, synthetic construct
  source 1..1299: mol_type = other DNA
atggctagcgcatggagtcatcctcaattcgaaaaatccggaatgaaggcagaaggtacaggccagaaggtacactctctgatcgataaagtctaccaccgtatcaaccttgatatggcatgggaatctgtacgcgcgaatggcgggagtgggggaattgataagattgccattcccgcgtttcaagctgtggccgaggtagagttggaacgcttacacgaagaattaaaacagggtacttatcggccgatgccggttcggcggatcctgattccgaaaaaaggcaaacccggggaaaaacgccctctgggcattccgacgattcgtgatcgtgtgtgccaacaagcccttaaaaaccgcctcgaaccgattttcgagcctctcttttcggaatgcagcttcggctaccgcccgggtcgttcaactcatcaggccatgcgtaaaatgtatcgtgaaatcctggatggctatgaatggattgtggatgctgatctccgcgacttctttggtaccgttcatcatgaacctctgattgaccgcattgcagagcaagttagcgatggtcgtattctgaaactggtccgtcagatgctggaagctggttacatggaagacggtaaaaaatatgcgacgccgagcggcaccccacaaggcagcgttgtgagcccactgttttctaacatctatctgaaccgttttgaccatgagatgacaagtaaaggttaccgcttgacgcgcttcgcggacgattgggttgtgctttgtaaaacccgtgccgaggcagcgcgtgcgatccgggacgcacgtacaatcttagaatccttgggtctgacgttacatccagagaaaacgaaaattacccacatcaagtggggctttgagtttctggggtataaacttaaacgcggcaaaggtctgtccctgccccaggaaaaggttaagaagcagccaaaaaccaacatctatgcgttccctaaagcgaaaagtgtccagtcgtttatggataccattcgtacccgtacccaccgccgtattccgttaactgtctttcagcttattgactccattaatccggtgatccgcggatggggcaattatttccgtaaagctcatgtccgcaaactgttcaaccgtttgcagcgttggatcgtgcggcgcatctggtcgcatcgctataaacgttggcgcaatgccggatggaagaaactgccggaatcaatcttgtacagcaaatacaatctggtgaatctcctgtcactgattccggatctcaacctgcgtaccgccccgaaaggctga

SEQ ID NO: 119 - DNA, 1338 bp, synthetic construct
  source 1..1338: mol_type = other DNA
atggctagcgcatggagtcatcctcaattcgaaaaatccggaatggaagtgactcgtcgggatcgtgtgaaagctggtttactggagaacatcctttcgcgcgataatatgttagctgcgttgaaacgcgttaaggcaaataagggttcgcatggggtggatgggatgaaagtagacgaactgccggcgtatcttaaagccgcttggcagaccattcgtcagagtctgttagatggtacctatgtacctcagccagtgcgccgtgtcgagatgccaaaacccgatggtggcgtccgtttacttgggatcccgacggtgctggatcgtttaatccagcaagccatcgcccaaattttgtcggatatttttgaacccggttttagctgccattcatatggttttcgtccgggcaaaggagcgcatgatgccattcgcgcggcgcgtgattatatccgtgcaggctacgactacgttgtggatattgacctcgagaagttctttgatcgcgttaaccacgacaaactgatggcgcgcgtagcgcgtaaagtagatgataaacgcgttctgaaactgatccgtcgttatctgaccagcggcgtgctggtcaatggagtgcgcgttgcctcagaagaaggcaccccgcagggcggccctttgtccccgctgttggcaaacattctgctggatgacctggataaagaactcgaacggcgtggtctgaaattttgtcgctatgcagacgactgtaacatctatgttaagagtaaacgggcgggcgagcgtgttatggcatcgattggtcgcttcatccgtgaacggctgtcactgaaaattaacgagaacaagagtgctgtagatcggccggcggctcgcaagtttctgggcttctctttttaccgtaagaaagacgacgtcggaatccgcatccacccgaaaagcgtgaaacgcttcaaggaaaaaattcgttccattacaaaccgtaattggagtatgagcatggacgaacgttttcgccggctgcacagcctgtgcgcgggctggatccgctacttcggcctcgcggatgcaaaaacacatatgcgtgaactggacgaatgggtccgtcgtcggattcgcgcctgcttctggaaacaatggaaacgcattaaaacgcgccatgataatctcgttaaactgggtgtggacagcatgaaagcctgggaatgggccaatacgcgcaaaaaatactggcgcattgccgggtcttgggtgttggcaaccactttaacgaatcaggtcctcgaagatatgggttttcgcaacctttccaaactttactccgagatgacctattcttga

SEQ ID NO: 120 - DNA, 1278 bp, synthetic construct
  source 1..1278: mol_type = other DNA
atggatacctcttctctgatggaacagattctgagcaaggagaatcttaatgccgcctacttgcaggtagtgcggaacaaaggggcggcgggcgttgatggcatgaatgtagaggaactcggcgcctatttatccgagaatggcgaaaacattcgtgagcaattacgcactcgaaaatacaaaccgcagccggtccgtagagtggaaatcccaaaaccggacggcggtgtacgtaacctgggggttcctacagttgttgatcgtttcgtacaacaagccgttgctcaggttttaacacctatctttgaagaacagtttcatgatcattcctatggttttcgcccgaatcgctgcgcacagcaggcagtactgaaagcacttgagatgatgaatgatggtcacagttggatcgttgatatagatctggctaagtttttcgatacggtggaccatgataaactgatgactatcttcgggcgtacaataaaagacggcgatgtgatttcagtcgtccggaaatttcttgtctcaggcgttatgattgatgacgagtatgaggacacgatcgtaggtaccccacagggtggtaacatttcacctcttctggcgaacattatgttaaatgagcttgacaatgagcttgaggctcgcggcctgaatttcgttcgatatgcagacgatcttattattatggtcgggtcaaaacaagcagccgaccgcgtgatgaaaagtgttacccggtttatcgaggaaaagctgggtttgaaagttaacgcggaaaagtcaaaagtggacaagcctaaaggtatcaagtacttgggttttggtttttatttcgatacttttgctaaggcatataaagcgcgtcctcatcctaaagcagttactaaatttaaagcacagatgaaaaaacttacttgtcgttcatggggcgtaagtaacgcctataaagtacaaaaactcaatcagctgattcgagggtggatcaattattttaaaataggaaacatgaaacgtctttgccagcgtttggattcaaatattagataccgcctccgtatgtgtatttggaaacactggaagacgcctaaaaacagagccaaaaatatgatgaaactgggtctgccggcatgggctgcatggcgctctgcctatatccatggttacgctcgagtgtgccgatctcgagatgtccatcggacaattacctcagaacgtttgaaacagtttggactgatgagtatgaccgattattatactgaacgtagcgtagcgtgc

SEQ ID NO: 121 - DNA, 1281 bp, synthetic construct
  source 1..1281: mol_type = other DNA
atggacaccagcagccttatggaacagattcttagcaaagataatctcaatgcagcttatctgcaggtggtccgcaataagggtgctgcaggtgtggatggcatgaccgtggaagagcttggcgcttatctttcggaaaacggtgaatctattcgggagcaacttcgtacccgtaaatatagaccccaaccagtgcgtcgggcagaaatctctaagccggatggtggcgtgcgtaaattaggcgtaccgactgtagttgatagatttgtccagcaggcggtagcgcaggtgctgactcctatttttgaagaacagtttcatgaccacagctacggttttcgacctaaccggtgtgcgcagcaggccgtgctcaaggcattagagatgatgaacgacggccatagttggattgttgacattgatctggctaaattttttgatactgtagatcatgataaacttatgaccattttcggtcgcactattaaagatggtgacgtgatctctgtggtacgtaaattcctggtgtccggtgtgatgattgatgatgagtacgaagatacgattgtcggcactccacagggaggcaatatctctccgcttctggcgaacatcatgctcaacgaacttgacaaggagctggaggcgcgtgggctggattttgttcgttacgcagacgatttgattattatggtgggtagtcgccaggccgctgacagagtaatgaagtcggtcacccgttttattgaggaacgattaggccttaaggtcaacgctgagaaaagcaaagtcgacaaacctaaaggcataaaatatcttgggtttggattttactttgacagttttgccaaggcgtacaaggcccgcccgcatccaaaggcggtggccaaatttaaagcccagatgaaaaaacttacttgtagaagctggggagtatcgaattcatataaggttctgaaactgaaccagctgatacgcggttggatcaactattttcgtatagggagtatgatagagctgtgtaaacgtctggatgagaatattcggtttcgcctgcgtatgtgtatatggaaacactggaaaactccgaaaaaccgcgccaagcttttaatgctgctcgacgttccgcgctgggccgcttataagatagcatactcaggcaaccgttatgcgcgcattacccataatggttgggttcataaggcaatttccaataaacgtctcgcggccttcggcttgatctccatggaagactactatgcgaaacggcgtgttgcgtgc

SEQ ID NO: 122 - DNA, 1281 bp, synthetic construct
  source 1..1281: mol_type = other DNA
atggacacaagtagtttgatggagcaaatactgtcgaaagacaatcttaatgctgcatacttacaagttgttcgaaataaaggggcggcaggggtagatggcatgactgtagaggaattaggtacctatctcagtgagaacggtgagtcaatccgtgagcaacttagaacgagaaagtataagccacagcctgtaagacgcgttgagattcctaagccggacggcggtatacgcaacttaggggttccgacagtagtcgaccgcttcgttcaacaggcagtagctcaggtgctgactcccatcttcgaagagcaatttcacgaccattcctacggattccgccctaatcgatgtgcgcaacaagctgtcctgaaggcgctggagatgatgaatgacgggcacgattggatcgtggacatagacttggcaaaattcttcgatactgtagaccacgataaacttatgacaatattcggacggaccattaaggacggggacgtcatctctgtggtgcggaagttcttggtttccggagtcatgattgacgatgagtacgaagacacgatcgttggaacaccgcaaggtggcaacattagcccaccactcgccaatattatgcttaacgagcttgataaagaactggaagcacggggcctggacttcgtgcgttacgcagacgatctcattataatggtaggatcccgccaagcagccgatcgtgtaatgaagagcgtaacgcgctttattgaggagcgcctcggcctgaaagtcaacgcagaaaagagtaaggtcgacaagccgaagggaatcaagtatctgggtttcggtttctacttcgatagttttgccaaggcctacaaggcgcgccctcaccaaaaggccgtggccaagttcatggcgcaaatgaagaagttaacttgtcgttcttggggtgtatcaaacgcgtacaaggtccagaaattaaatcagcttatcagaggctggatcaactactttaagattggatcaatgaaggggctttgcgaacgcctggactgcaatattcggtatcgccttagaatgtgtatctggaaacattggaagacaccgcaaaatcgggcgaaatacttgatgcaactgggtattggacggaagtacgcctggagtacggcatatactggcgcccgtatagcgtacgtttgtcaacggggtgccatgaacatggccattaccaaggaacgccttacgagatttgggttggtaagtatggctgactattacgccaagcgtcgtgtcacgtgc

SEQ ID NO: 123 - DNA, 1278 bp, synthetic construct
  source 1..1278: mol_type = other DNA
atggatacgtcttctctgatggagcagattctgagcaaggaaaatctgaacgaagcctatctgcaggtcgttcgcaataaaggtgcagccggcgttgatggtatgtcggttgaagaattaggcccgtacctttccgaaaatggtgaaaatatccgcgaacaaatgagaacccgtaaatacaaaccacaacctgtgcgccgcgtggaaataccgaaaccggacggcggtgtgcggaatctcggtgtgccgaccgttgtagatcgcttcgtccagcaagcggtagcccaggtgctgtcaccaatctttgaagaacagtttcatgaccacagttatggtttccgtccaaaccggtgtgcccagcaggcagtgttgaaagctctggaaatgatgaacgacggccataattggattgtagatattgatctcgccaagttctttgatacagttgaccatgataaactgatgacgatttttggtagaacgatcaaagatggtgacgtaatttccctggtgcgcaaatttcttgtttctggtgtgatgatagacgacgaatacgaagatacgattgtcgggacgcctcagggtggtaatatcagtccacttcttgctaacatcatgctgaacgaacttgacaaagaactggaggctcgtggtttagattttgtgagatatgccgatgacctgatcatcatggtgggttctcgccaggcagccgaaagagtaatgaaaagcgttacgcgttttattgaaaataaattaggtttaaaagttaacgctgagaaatcccgggtagataaacctaagggcatcaagtatctgggttttgggttttattttgattcgtttgcaaaaggctacaaagcacggccccatatgaaagctgtggaaaaattcaaagaacagatgaaaaaattgacatgtcgctcttggggcgtatcaaatacctacaaagtaaaaaagctgaaccagctgatacgggggtggatcaactattttaaaataggttccatgaaaaacctgtgccgtaaattagatgcacacattcgttttcgtttgagaatgtgcatatggaagcagtggaagacgccaaagaacagagaaaaaaatctgattaaactgggcttacctcgttatgcagcccatgggatctcctatgcaaaagggtatgcacgcgtctgtcgttcttggaatttacacatcagtatctcgaaagaacggctggccaagtttggactgatttcaatggaagattattatgcagagcggagagttacgtgt

SEQ ID NO: 124 - DNA, 1287 bp, synthetic construct
  source 1..1287: mol_type = other DNA
atggatacctcaagcctgatggagcagattctttcaaatgagaatttgaatgcggcttatttacaggtcgtccgtaacaagggagcagcaggtgtggacggtatggagtatacagagttacaaaaacatctcagcgagaacggggagataattaaagaacagcttcgcacacgtaaatataagcctcaaccagtccgtcgcgtagaaattccgaaagccgatggaggtattcgcaaactgggcgtcccgacggttaccgatcggtttattcaacaagccattgcacaggtcttaaccccaatttatgaggaacagtttcacaatcatagttatggctttcgccccaatcggtgtgctcaacaggctgtcatgaaagctctggagatgatgaatgatggccatagctggatcgtagatatcgatttagaacgcttttttgacaccgttgatcacgacaaattaatgacaattataggccgcaccattaaggatggtgacgttatatcaatcatcagaaagtttcttgtctcgggcataatggtcgatggcgagtatgaagatagcgtaattggtacgcctcaaggtggcaatttatcaccactgttagccaacattatgttaaacgaactggataaagaaatggaagctcgaggtctggattttgttcgttatgccgatgactgtattattatggttggctccagacaggctgctgaacgtgtgataagatcaataacccgctatatcgaagagaagttggggttgaaagttaatgcgtcaaaaagtaagatagacaaaccaaagggaattaaatatctggggttcggattttattatgactcatttgcaaaagagtaccgtgctaaacctcatgcaaaggccgtcgagaagtttaaagcacgtatgaaagagctgacgtgccgttcttggggtgtcgataacggttataaggtcaaaaagctcaatgaattgatccggggttggataaattatttcaaaattggaagcatgaaagggttatgcgagaaactggacgcgaacatccgttaccgcctgcgcatgtgtatttggaaacactggaaaacacctcagaacagagcaaagaatctcattaaactcggaatatcacgccggtacgcatggtcaaccgcgtattccggggcacgtatcgcgtacgtctgtcagcgtggggccatgaatatagctgtaaccaaggagagattgaccagattcgggttggttagcatgcttgactactacgtcgagcgccggagcttgatgctgtcg

SEQ ID NO: 125 - DNA, 1302 bp, synthetic construct
  source 1..1302: mol_type = other DNA
atggagttaattgattggattctggcagaccaaaatattgatgccgccatttgggctgtgaaacataatcgtggtgccgcggggattgattccatgcaggtcgacgaactggatgagtatttcaaaaatcatcgcgaggaaatcaaacagcttatccgtgaaaaaaaatacgtacctcaaccggtccggcgcgtatacatccccaagccggacggaaaacaaagaccactgggcattccgaccgtcgtcgatagagttatccaggaggcaattgccatagtgctgatgaaaggatatgatcgctacttttcagagtatagctacggatttcggcctaatcgtaattgccatcaagccgttacgaaagccctggaatatatgaattctggctatgaatgggtggtggatctggacatagaaaagtacttcgatactgttaatcatgataaactcgtttctattctgcgggaacgcataaatgacgatacgactcttcacttgattcgggccttcctgaaagcaggtgttatggaaaacggtctggtttcccctaccgaacagggagtaccgcaaggcggccctctgagccctgtgttaagcaatgtgtatttggataagcttgatcgcgaacttgaaaatcggggcctgcacttttgtcgctatgcagacgactgcaccatctacgtcggatcggaaatggctgcgaatcgtgttatgcgctcaattgcggactggcttggccgaaagttaaaattacgcgttaacatgacaaaaagcaaggttgtacgccctagtggctcacagttcctgggctttagattttggaaaagtccgcgcgaaggatggaaacccaaaccagcaaaagagcgctgtaaacgtctcaaagacaaggtacgggcaatcttatgccgccgcaaagccgttgcggtaccgctcggtgttacgatcacaaaactgaaccaactgatgcgtggctggattaattacttctgtctcgggagcatgaaaggttttatgaaggaatttggcgaatggatgcggcataaggtacgagtggtcatcttaaaacagtggaagaaggcggataccatctatcgcaatttacggaaaacgaacagaatttgtcgctgcgggattagtgatgaagaaatatacaaggtcgcatactcaggtcggggctggtataaaagagcaacacacaatgcagtaaatttcatcctgagtccacaagttttatctcagagaacgaaacagcgcccagggctcgttgatcctctgaaatattatctggcaagatgtacc

SEQ ID NO: 126 - DNA, 1389 bp, synthetic construct
  source 1..1389: mol_type = other DNA
atgggaaccgaaaaccgcgaatcatgtagtcaacgtgattcagctgaaagaaaaggatatgtccgtgcgcatagaagttttaaccgtatttggaaggaacgggatagcgccgaaccagatattctcggcaaaattctggagaaagataatctcaaccgggcatataaacgtgtgaaagccaataaaggcgctccgggcgttgatggtatgacaattgaagccacattaccgtggttaaaagagcacaatcatgaacttgttgaacgtatcagaaaaggaaaatatacaccgagtccggtgcgtcgcgttgaaatcccgaaaccggatggaggtatacgcaaacttggaatcccgaccataattgatcgtattattcagcaggccatgcttcaaccgctgctgcctatctatgagccccttttttcagatgattcgttcgggtatcgccctggtcgaggtgccaaggacgcgatttttcgcatcaaagaatacattgaacaaggctacacaagagccgtggttttggatctgtctaaatattttgacacgctcaaccacaccatactgcttaatctgctgcgtcgccaggtcaaggatgaacgcgtcattcaaatggtgaagcgctaccttaagtctggtgtgatggaaaatggtgtggtcgcagaaaccgaagaaggatcaccgcagggggggaacttgtcccctctgttagcgaatgtgtatttgaatgaatttgactgggaattccatcgtcgcggcgttccgtgcatacgttatgccgacgatatagttctgttagctaaaagcgaacgagctgcggagcgcctgctcgagtcatcagctaaatacctcgaggaaaccctcaagctgaaggtgaatcgggagaagagccgtaccgtatcggtgttcgccatccgcaattttaaatttctgggcttctgtttcggaaagaatggtaagggtatatatattcggattcacggcaaatcctggaagaaagctaaagacaaacttcgtcagctgacgtctagatccagatgcggttctatcgtgcgtacaatggaaaaaatcaaagtgtatatgcgtggttggttaaattattatggcattgctgatatgaaaaataatatggaaagtttgaacggatggctctatcggagaatccggatgtgcatttggaagcagtggaaactgccgaagaccagaaaacgaaaactggctggtctgggagtcgattcacactatgccgcaactattgcctacgatcgcaagggttattggtttaacgcgggtaataaggccgtgaactgggctctgagcaaggaacgcttgaccaattgggggctgtacgatctggctacggcatatcaaagtgtccatgtaaattat

SEQ ID NO: 127 - DNA, 1278 bp, synthetic construct
  source 1..1278: mol_type = other DNA
atgaaacttattgaaactatactcttttcagagaacgtaatcaaagcccagagccgtgtattatcaaataaaggcggagcaggcattgatggcatgcacgtggacgagctggcagaatatatgcgtgctaactgggatggtattaaagaaagtattctggtgagaaaatacaaccctgctcctgtacgccgtgtcgaaattccaaaagtaaacggtggagtgcgtaaattaggcatccctacggtccttgaccgcactattcaacaggccattgtgcaggtgttatcacctattttcgaaaacgagtttcaggaaaatagctacgggttccggccgtgtcgttcgtgcgaacaggcgattttaaaattattagagtatcttaatgaaggttatgagtggatcgttgatattgatttggaaaagttcttcgataatgtaccgcaggataaactcatgagttacgtcggcagagtgatccgtgatccggatactgaatcactgatccgcaagtaccttaagagcggcgtgatggaaaatggaatctacgaagccacagaagagggcaccccccagggcggtaacctctcgcctttattgagtaacattatgctgaacgaactggataaagaattagttaaccgtggcctgcattatgttcggtatgcggatgactgcgtgattgcggtgggcagtgaggcaagtgcaaaacgtgtcatgcggtcagttacgacctggattgaacgggaattgggcttaaaagtgaacgcttcaaaatctcatatatgccgtccaaccaagttgaagtatcttggcttcggcttttatcgaaacccccaaaatcgccagtggcagtcgcgtccgcacgaaagctcagtttcgaaattcgttcgctctctgaagcgcttgtgcaagcgaagctggtcagttagcatgacagatagaattactcgtttgaattatgttacccggggctggatcaactatttctcaatttccttcatgaaattgaagctcgagaaaattgatgagcatttacgtaccatgctccgcaaggtaatatggaaacaatggaagacacctcaaaagcgtgcgtggggtttaagaaagctgggtgtcgacagcgccttagctcgccgtacatctttttgtggggatcgctacgagtgggtagtgcgccgcacttgtgtagcccgcgcaatttccaaagatgtttttacgcgtcgcggcctggtttcgtgccttgattattaccttattagacatagcttgaaaacgtcg

SEQ ID NO: 128 - DNA, 1398 bp, synthetic construct
  source 1..1398: mol_type = other DNA
atggagtcttacctgacgcaagatagagcggagccagaagcaggttgtggtgcgaattcggtatcggacactgagggtgacgggcgcaccgtacaacatgacctggtggaagaggttgtctcttggagtaacctggaagccgcgttaaagcaagtggtgtcgaatcgtggggcccccggggtcgatgggatgacagtcgacgagttaggaccgtggttagaaaccaattatagtgagttggcagaaaaggtacgtaatggtcgatatcgtccaaacccggttcgccggaaggagattccgaagccgaacggcggtgtgcgtgacctcggaataccgactgttgttgatcgtctgctccagcaagcagtgagtcaggttttgatgcctatttatgagcctagcttctcagacacatcatatgggttccgcccgggtcgttcagcacatgacgcaattcagaaagccaaagagtaccttagcgagggcttcgggtacgtagttgatctcgacttagcgagattcttcgacacacttaatcaagattacttgatgaacatccttcgtgagcgtgtccgcgataaggccctgctggagctgattaaacggttccttcggagcggcgtcgttcttccgaacggcctgctccgcgagacacgtgaaggtagtcctcagggtggaccgctctcgccattacttagtaacatataccttgatcggttcgataagctcctggaaagccgcgggcttcgcttcgtgcgttacgcagatgactgcttggtcttcgtgcgaactccgcgcgccggcgaacgcgtccgcgaatcagtcactcgttacttagagggcactttgcggttacgcgtcaaccaagaaaagaccgtagtcggacgtgcggatcaggtgaagtttctcgggttcagattgtaccggcaaaagactgttggtgccaccgttcatgactcctcattggcgagattccgaaaggaagtacgccgcatcaccaaacgtaatcgcggtacgagcctgggcagcgtactgacagagctgaaaacctttacgagaggctgggtggggtatttccggattggcttaagtaagtcacgtgccgaaaagctggatggctggattagacagcgcgtccgacaatacattttcaagcaatggaaaaccctgcgcaaccgagcaagtcagttagtatctttatgtcccgactatttgcggccgcgcccgggtttcacaccatacagttgggtgcgcgagtgtcgccgcgcggcattttcgcgctcgtactggaaggcagtgaactatccagttgtcaagagagctttatctaattcgtacttagccggccttggactgtactccctgtctgagcaattggaaaagtggaataaaggcgtt

SEQ ID NO: 129 - DNA, 1404 bp, synthetic construct
  source 1..1404: mol_type = other DNA
atgaaggatggtatgcagaaaacatccgcattagccaacgactatccgcagcgtaatcgtactgaatcggaacgttatggaggtgtgcaaacctttatgtggatgacggaagacaacattgttgaggtgccttttgacaaggaacacctgttagaagttatcttgtctccggataatctgaataaagcctataaagcggtcgtccgaaataaggggtgcggcggtatcgataagatgtcctgcgaacaactgttgccatggttgaaagccaataaagacgaactcattcgcagcctgttagacggaacttaccgtcctaatccagttagacgggttgaaattcctaaggataatggtaaaatgcgtcttcttgggataccgaccgtggtagatcggatggtacagcaggcgattaaccaggttctgactgtaatctatgaaccacaatttagtaaacggtctttcggatttcgaccgagacgtggctgcccaactgccttacgtgaagtgcaaaaaatcgttaatgaaggttacaagtatgttgtagacttagacctggagagatttttcgacacagtttcacattcaaagttgatcgaaattctcagcagaacattaaaagacgggcgtgttgttagcctgattcaccgctatctgcggagcggcgtcattgacaagggcctgtggcatgcttctgaggagggtacccctcagggtgggccgttatctccactgttgtccaatattatgcttaatgaactggataaagaactggcgcgcagaggtcacccatttgtgagatatgctgatgacagcatgatattttgtaaaacaaagcgcgcagctgagagagtgagagaatcaatcactaagttcattgaaggtaaactttttttgaaagtcaataaagagaaaacagctgtctcatacattaagggggtgcggtacctggggtattcattttatattcataagggcaaatgtcagctgacagttcaccctaagtctaaggcgcgcatgaaatcgcgtctcaaagagcttacgagccggtcaaacggttggggttacgagaaacgtaaacagaagcttaaagagtatattcagggttgggtgggatattaccatctggcggatatgaagcgtttatgcatggaaactgataaatggctccgacgtcgcattcgcatgtgtatctggaaagcatggaagaaacctcgtactaaggtagcgaacctgataaaatgtggcatcgcagagtggcaagcctatcagtgggggaatacacggttggcgtattggcggatcgcccacagccccatcctgttaacagcaataagcaatgatcgcctgcgtaaacaaggatatatgtgccttatggatctgtatctggagtggaaccccaaa

SEQ ID NO: 130 - DNA, 1368 bp, synthetic construct
  source 1..1368: mol_type = other DNA
atgtctcttggtcgtgcagttcatcagaaaccgggtgatacaggacgcagcgcaggccgtcgtggggaggcagagccaaaagctatgagagatgaagctcggaccgcccgccacgaaaccgcgtcgccgggccgtgaagacctgttaggtcaagccttagctagcgctaaccttgaagccgcctggaagcgtgtcaaatcgaacagaggttccgcgggagtggatggattatctatccgtgatacggccgaacatttgaaaatgcactggcccagaattcgtgcctcgttgctggatggtagctatagatcgcagcctgttcgccgtgttcagattcgtaaaccagatggcgggatgcgtgaacttgggatccccaccgttacagatcgcctgattcaacaggcactcctgcaggttctgcaaccgcgtttagacccgactttttcggaacattctcacggctttcgtccgggacgacgggctcatgacgctgttcttgaggcgcagcggtatgtccagagtggctatcgtgtagtggtggacgttgacctggaaaaattctttgatcgcgttaatcacgacatcctgatggcccggctggctcgtcgtatcgacgataaagccgttttacgtttgattcgtagatacctggtagctggaattatggatggaggggtagtgatggagcgctacgagggaactccacagggaggaccgctgagtcctttattagctaatgtgctgctggatgaagtggatcgagaacttgaacgtcgcggtcaccgctttgtccgatacgctgatgattgcaatgtttacgtccgctctcgccgcgcgggtgaacgtgtgctggcgggcttgcgtcggctgtatgaacgcctccacctgaaagtgaatgaggcgaaaactgcggtggccccttcaagtagacgaaaatttctgggttatgctttttggtacggtccgggcggccaagccaaatgtcgcgtagctgataaagctaaagaaacatttaaacaacgtattcgcgaaatgacccgccgtagtggaggtcggtcactccctgatatagtcgagcgtttacaaacatatttgccgggttggaaagcatattttcagcttgctcagacgccaaaagtatttcacgaactggatgaatggattagacatcgcctgcgcgctgttcagttaaaacattggcggcgcgggaaaacgatgtatcgggaactgaaaacgatgggagcaagtgaaacggacgctcgtcaagtggcagctaactcccgtcgttggtggagaaattcgcgcttcctcctcaaccgtgccatgccgatagcatattttgaccgcttgggggtaccccggttgtcg

SEQ ID NO: 131 - DNA, 1413 bp, synthetic construct
  source 1..1413: mol_type = other DNA
atgcaagtggataaggttttcctcatgaccgataacttaagttcaacgcaatgcagaaacgaaactctgcttggggcagacgggatacgggcgagagttgcaggaccaagaccgaagggagtctcggtaaaagcgacgccatcatggacgaaagcagaccccggttggtgtaacatagagaaggtggttaacagtatcattattgacgaagcacttagtaaggttatttccaatcgtggcagtggcggggtcgaccatatcacaacagctgagcttagagattattggagcaagtacggtggtactattcgtcagaagatcgttcagggaacctatatcccccttcctgttaaacgcgtagacataccgaagccaaacggtgataagcgaatgctgggcataccatcggtaatagatcgcgtgatacaacaagctttggttaacgtcttggagcccgtatttgacccacaattctctgagtttagttacgggtttcgcaagggtcgcaatgcgcagcaagccgtactgcaggcgcagtcatacataaaggatggacaccgttgggtggttgagcttgacctgtctaagttcttcgatagagtgaaccatgacattttaatgtccagagttgcacgagtggtcgaggacaagcgcatattaaagttaattcgccggtatcttaacgcgggtattatggaagacggtatcgtaaagccgcggtccgagggagttccgcaaggcgggcctctgagcccactgatgagcaacattatcctgaccgagctggatcgtgagttggaaaagcggggccataagttctgtcgttacgcggatgactgcaacatatacgtgaagtccgaagaggctgcaaagagagttctcgaaagtgtgaccaaatatcttgaaggtggcttaaagttgcgggtgaaccgcgacaagagcggtacctttcgtccgtacgagtctgttttcttgggctactcattccaccgtcgcaactggacgcggatcgtcgttgctgaggaatcaattaagcgcttgaagaccaagttaaagattatctatcggcacagccggggtacatcccttggcaccgctattaagaagctcaaccaaatccttcgaggttggagaacgtatttcaagcttgacacgcgcaaaggattcttcgaaaagcttgacatcaacattcgcacacacctgcgagtactcatatggagagcctggaaaagaccacgcactcgggagcgtgagttaagaaaacgtggccttgacgctttcaacgcatggaagtcggcgaacaacggacggggtccctggtacaacgcacgggcgccccacatgcgcatagctattccgaacgctctgtttgtaagactgggtctttataatctgtcttcaatgggtaccgtc

SEQ ID NO: 132 - DNA, 1287 bp, synthetic construct
  source 1..1287: mol_type = other DNA
atggtgagtctggaaaagatcttagaaccatcaaatttaactgaagccctgaagcaggttgtaagtaacaaaggagcgcctggcgtagacgggatggcagtagatgagcttgagcctttcattcgcaatcatccaggtgtgttgagccaggccatccgtgatgggtcttatagaccaagcccggtcaaacgtgtgtatattcccaaggataatggtgagaaaagacccctcggaatcccaaccgttgttgatcgcttagtccagcaagctatcgcacagaaactgtcggaggaatacgaacctaatttcagcgataactcctttggcttccgaccgaagcggtgtgcccacgacgctctgaagcgcatcgtcgataacgcgaacgacgggtatgagtatgtcatagaccttgatctggcgaagtttttcgacactgttaatcatagcaaaatgatacaggtattgtctgaaaccgttaaggatggacgagttgtttcactggtccatcgattttttcgtgccaaaattaatgacgaaggcaaaattattaaaccggccattgggatgcctcagggagggcccttatctccggtgtgcgccaacatactgctgaatgaactggaccaattattagatggccgtggtcatcggtatgtgcgctatgcagatgatatgttgcttcagtttagatctctgagagctgccgaacgtgttttcacctcagtgaaacggtttatcgaggagaagctgtttttgaaagtcaatgtcgagaagaccaagatctgtcatctgtcaaaagacgtgaaattcttagggtattcattctacaagtcgtacgacaaagatgacctggatggcaaaggtaaatggaaattagtggtgcacggcaagaaacgtcgttcttttgagcagacaatcaaaacattgcttgatcgaaaatgtccaaaaggactggaaagatgtaaagaagatttgaaactgtatttatgcggttggaccaattatttttacatgggactgtcccgttcgcggcgccaaagttatgacaaatggattcgacgtcgaatacggcagttatactggaaaatttggaaaaaaccgtccacccgcattcgcgcactgatgcaactggggattgagcgttccaaagcaaatgagtggggtaatagtagcaaggcgtattggcgtgtagccggcagctggatcttgaaacgctcacttaccaatgatgttctccagaatttggggtggatatggctgggcatagcccgcaaatggagtccgcaa

SEQ ID NO: 133 - DNA, 1413 bp, synthetic construct
  source 1..1413: mol_type = other DNA
atggaaactcgccatggcatgaagtatcggcaactgcatattgaggattacttaggagagattcctgcggaacagggacgagggaccggtgtgtatgcacacgaatggattactggcaacccggacaccaacactgatttttggaccgataacctgttagacgctatacttagaagtgacaaccttaacgcagcctataaacgcgtcaagtcaaatcgcggaactggaggtatcgatcgcatgcaggttgacgaacttctcccatatttgcgtaatcaccgtgacgagttgatacgccagctgagagagggtaagtacaagccgaatccagtccgtcgggtagagataccgaaagaaggtaaggataaagtacgcaaactcggaattcctaccgtggttgatagaatgattcagcaggcaattgctcaggaactgacagctgtatatgaagagcagttctctgaaaattcctacggttttcgtccgggtcgtagtgcgcacgacgcgcttgaaaaatgcagagaatatgtcaatgagggctatatctatgcaataagtatggatctgcaggcctactttgatacagtgaatcattcgaaattaatagaagtactgagtagaaccataaaggacggccgcgttatttcactgattcataaatacctgaaagcaggtgttatggaagatggtggcttccacgcgaccagtgaaggtgtgccacaaggcggtccactgtccccgctctgtggcaatgttatgcttaacgaacttgataaagagcttgaacgacgtggtcacaagttcgttcggtatgccgatgattgcattgtactgtgcaaatccagaaaatcagccgaacgaacacttaaacatataatcccctatataactaaaaaactttacttaaaagttaatcttgaaaaaaccactgtttcgttagtaagcaaagtgaaatacttagggtatggtttttaccgtaataagggtaagtgtcgtatgagagttcatccaaagtcgatcagaaagatgaagaatcatttgcgtgagttgaccgtacggggcaataaatggtccaatccggaacgggaggaaaagttacgccgttacactacgggatggattaactattatagactcgctgatatgaagagcttgatggaaacaactgacgaatggctgcgtcatcgaattcgggcggtgtactggaaacagtggaaaaaagttcgtacacgctataaaattttgagaacgctgcacttaccagaatggaaagttcatgaattggccaactgtcgtaaaggaacgtggcgtgctgcgtccacgttgaattcggtactgaccaaaaccgttatcgttgatcggcttggctatccaagtatgaccgcgcattacctgaaagtccgggtgaattac

SEQ ID NO: 134 - DNA, 1305 bp, synthetic construct
  source 1..1305: mol_type = other DNA
atgtgcgaaatacgaaaggtggaaacggacatggagctgttggaagaggtgttgagcaaagacaacttgaacaaggcatataaacaggtatacaagaataaaggtgcctcgggtgttgacggagttacggtagacgagttgtttagctacattcaagaacacaaagaggaaattctgtggaagattcgtaatagaaagtacaaaccacaaccagttcgtagagtcctcattcccaaagataacgggaagatgcgtaagctggggataccgtcagttatagatcgagttatccaacaagctatcgtgcaagttctcacacctatttatgaagagcagttctctaaccatagttacgggttccgtccaaaacgttcatgcgaaatggcagtagtgcaagccctggagtacttcaacgacgggtatgactggatagttgacatagacctgcaatctttcttcgacgaggtaaaccaggacaagttgataggcatcattagacgaacgattaaggacggtgaccttgtatccttgatccgtaagttcttacaatctggtgttatggagaatggagtactgcaaccgaccaagaagggtacacctcagggtggaaacctttcccccttactctccaacataatgctgaacgaactggacaaggagctggaagctcgacgcctgcactttgtcagatacgcagatgactgccttattttggttaagtcggagaaggctgccaatagagtaatggagagtataaccaagttcattaccaagaagcttggtctgaaagtcaatgtggagaagtccaagattgccagaccggacgacattaagtaccttggtttcggtttctacaagaagatcaatcaaaatgagtggcgcccgaaaccgcacataaagtcggtacagaagttcaagacgaagctccgtgacattcttgttcgtagccgttcaattagtctcgacgatcgactgttgcgccttaagcagctcatttacggctgggtcaactactttcgtatagcggacatgactattttgcttagagacatagacggtaacattcggcgcaagcttcgggttattatctggaagcaatggaagaagattaagaaacgctacgcgtgtttgagaaaactcgaaataacacatagagatgcttacgtgacggctaactcacgatcaggttactatcacatctcccatacccgcgttttggaaaaggctatttccaaagagagattgaataagcggggccttgtgaactcgttggattattatctgaaagtccacatcatcacgaat

SEQ ID NO: 135 - DNA, 1389 bp, synthetic construct
  source 1..1389: mol_type = other DNA
atgtcgaaggcgatgcgtcagatgccggggcagcctggtcgtgtgtgcgtcgcacatggtgaagcagtgcgcgatttaatttctgacgaagccggtggaccccctcgcgaacatccggataccggctcagcaacgcctcccactggaccaggcggtttattggcagctatgttaacccgtcaaaacttgcagctggcctggaaacgggttaaggccaacaaaggtgcagctggcgtggacggattggacatagaacagactgcgcagaccctgcggacgcgttggccggatattcgccagtcattactgcaaggtcggtatcgtccttcacctgtgcgaaaagtgatgatcccgaagcctgatgggactcaacgtgagttaggaataccaactgttacagaccgtctgatccagcaagcacttttacaggtgttacagcctctgattgacccgaccttcagcgagcactcgtacggctttcgtccaggccggcgcgcgcatgacgcggtaaaagctgcacgtgcttatgtccaatccggaaagcgtgttgtagtggacgtcgatctggcgaagttctttgatcgggtgaatcatgacatactgattgatcgcttgaatcgtcgagttgatgatgctggcgtcatccgtcttgttcgagcttatcttaacgcaggaatcatggacgggggtgtggtggtcgaccgtcacctgggtaccccgcagggagggccgttaagtcctctcctggcaaatgtgttacttgatgaggttgacaaagcgctggaagcacgtgggtactgcttcgctcgttacgcagacgactgtaatgtctatgtaggttctaaaaaggctggcgaaagagtaatggcctatccgtacttgcgtcgattatatgtcaatcttaaactgcaaataaatgaagccaaatctgccgtagcttcagcgtttggacggaaattcttaggatacgcgttatgggtcgctaaagggcgtgaagttaagtgcaaagtggctcaaaaacctctccaaaatttcaaggcgcgcatccgtcaactgacgcgtcgcagcgggggtcgttctatggcccaggttgtcgataaattgcgcccataccttttagggtggaaggcatattttggtatggcgcaaacaccgggagtctggcggggcctggacgagtggctgcgtcatcgtctccgggcaattcaactgcgtcaatggaagcgacctaaaaccatacatagagagctgaaagcactgggtgcatcagacgacgtcgctaaacaggtggccggtaattgccaccgttggtggcgtaattcagatggagttatcaagcgtgtcttagcgattgcttattttgatcgtctgggtgtgccccgtctgtca

SEQ ID NO: 136 - DNA, 1350 bp, synthetic construct
  source 1..1350: mol_type = other DNA
atgcaacaaaagacgtacagagatccggatgcgggaagacgcggtgaagctcctgacgccggcagccaaggcgcggagactgtacaggcccctactacccgtgagtcaccgagttcaacagcgtggttgatggaagccatatgtgaaccggtaaacctgcggcatgcactgaaacgtgtcaaggctaataaaggtgccgcgggggctgatggcatgagtgtgtcagagttgcccgactacttacgccatcattggcctgaactgaaagcccagctgcttagcggtagttatcgtccgtctcccgttagacgtgttaccatacccaaaccggggggaggcgaacgtctgctgggcatacccacagttgttgatcgttttatacaacaagcaatgatgcaggttctgcaggcacagtgggatgcaacgttttctgattccagctatggattccgcccaggtcgcagtgctcaccaggccgtgaaacaggcacagaaatatatcgagtctggatatagttggggtgtggatcttgaccttgaaaagttctttgaccgcgttaaccatgacgtcttaatgtctcgcatcgctaagcgcgtgagcgataaacgggtgttaagtttgatccgaggctaccttaatgccggtgtgatggaagcgggccttgtgatgccagtaactgagggcaccccgcagggaggacctctgagcccgctgctttcaaatttgctgctggatgacttcgataaagagctggaaaaaagaggtttgaagttcgcacgctatgctgatgattgtaacgtgtatgtcaaatcggagcgagccggaaatcgcatgatggcaggtttaactcattggttaaatcgtaagctgaaacttaagctcaatgctaaaaaatctgcggtggcactgccagaaacccggaaatttttgggttattcatttcgccgcggtcgaaaagtttggtgtgtcgtttcgcctgaaagcgtaaaacgatttaaaacccgtattcgggagctgacgggtcgtaataccggtaagagcttggaacagcttatcgaaccgttaaaacggtatttaaccggttggaagtcatattacggactgaaccagtggcagacattaatgcgggaccttaatcgttggattagacgccgtctgcgatctgtcctgtggaaacagtggaagaccggctcgaaacgttttaaagaattacgtcgaagaggagttagcaaggatcttgcggcacagacagtcggatcttgtcataaacagtggcgcataagctgctcccctgccttgtcaattgccttacccaatcgtttgtttgtccgactgggtttgccagaactg

SEQ ID NO: 137 - DNA, 1407 bp, synthetic construct
  source 1..1407: mol_type = other DNA
atgcgttcgcaggaggggcggagacaacaaaaagcccccgaaggggcctacctgtgggaggaaatggtcaaaccatggggtactacgggtggtccgtcaccgtcatccgcacaaggtggggccactccccgaggaggtcagggcagcgggttaatggaacaggttgtggaacgcagcaatatgctggctgccctccgccgcgttgaacgaaacggaggggccccaggcgtcgatgggatccctactgaacgcctcagagatcagatccgtgcggaatggccgcgaattcgtgaagaactgctggccggcacataccgtcctaaacccgttcggcgcgttgaaataccgaaacctggcggaggtaaacgtttacttggaatcccgacggctgtagaccgcttgattcaacaagcacttctccaggttttaacgcccatatttgatcctcaattttccgaggcctcctatggtttccggcctggacgccgggcccatgatgccgtgcgaaaggcccgtcagtatgttgaagaaggatacgaatgggctgtcgatctcgacatcgagaaatttttcgatcaggtaaatcatgacatactgatggcacgtgtagcacgcaaagtgacagataaacgtgttctgaccctgattcgtcgttatctgcaggcgggggttatggtcaatggtgtcgtcatcgaaacaggtgagggtacaccacagggtggtcctttgagcccactgttggcaaatattcttctggatgatttagataaggaattggaaaaaagaggccacaagtttgttcggtacgctgacgactgtaacatatatgtgaaatccaaacgggcaggggaaagagttatggcgagtatccgtaagtttctgcaggaaagactcaaactgaaaataaacgaacagaaatctgcggtggatagaccgtggaagctgaagttcttaggattttcgatgcataagcgcaagaccggtgaaatcctgatacgcctggccccccaagcaattgaaagagttaagggaaagatccgagaaatcaccgctcgcaataaacccgtatctatggcggaacgtatagaacgacttaacacttacttgggtgggtggattggatacttcgccctcgcagaaacgccgtcggttttcgaggagatagagggctggatgcgccgccgactgcgtatgtacctttggaaacagtggaaacgcgtgcggactcgctatagagaactgcgtgccctcgggttgtccgaatgggttgtgcaccagttcgctaatgcacgcaaaggtccttggcgcatggcccatggcccgatgaatcgtgcgctgggcaatgcctattggcagtctcaggggttaatgagtttaaccgaacggtatcagagtctgagacaagcc

SEQ ID NO: 138 - DNA, 1377 bp, synthetic construct
  source 1..1377: mol_type = other DNA
atggtaaagcccttacgccttgatcgtagagctgaaagatcaccgacgccgtcagaaggaatgtctgaggccgttggggaaggagtctgggaacaggtattcgagcgcaagaacttactgtcagcactgaagcgcgtcgaggccaatggtggagcccctggggttgacggcatgactgttgaagcgttgcggccctacctcaaggctcactggctggagctgcgtgcagcattagacagcggtaactaccgtccctcacctgtgcggcgtgttgagatagggaagcccgatggtggagtacgcctgctggggataccaaccgttgtagacagattaatccagcaagccatcggtcaggtcctcactcctttgttcgaaccggtgttttcacctcattcctacggattccgcccaggtcgccgtgctcaggacgctgtggaagcagctcaagggtatataagagagggatatacgtgggtggtagatatagaccttgagaagttcttcgaccgagtgaaccacgataaattaatggcaagagtcgcccgcgcagttaaagacaagcgtgtattaaagctgatcagaagatacttgcagagtggggtaatggtcaatggtgtggtgatggagacggaagagggaacaccacaaggtggtccgttgtcgccgttactcgcgaatattatgcttgatgacctcgataaagaactggagcgtcggggtcaccgatttgtgcgttatgcagacgactgtaatatatatgtgcgtactgagcgggccggcgagcgtgtcatggacagtgtgcgaggctttcttgagaagaaactcaagttgaaggtcaacgagaagaagtcggctgtggcccgtgcgggtcagcgtaaattcttagggttctcctatttctaccgcaagggagaagttctgattcgtgtcgctgagcaagcgcaacaacggcttcgagaaaagttacggggcctgacgcgtcggactcggtcaggccgtctggaagagataattcaacaactcaaggaatatatgcgcgggtggatgggttatttcagactggccgacacccctagtgttttcgcgggattagatcactggctgagacggcgcctgcgtcaactgctgtggaaaagatggaagcgtgggactacccgttggcgtgagcttgttagtctgggtgtccctcggcgccttgcgggactcggagcgacaggaagttcaccttggcgtatggccggcactccagttgtccacatggctctttcgaatgcgttttgggatgcacaaggtctttgcagtttcacggagtactaccaccaactgcatttaccaagacgcactgcgggttgcggtcctgcatgtccggtcgtc

SEQ ID NO: 139 - DNA, 1368 bp, synthetic construct
  source 1..1368: mol_type = other DNA
atgggtgaagttagagttaaaccggggggtactccgcgtggtcgttctatagatcgccaggatttaaaattaatcttaagacgggaaaagtatcgtatggaccttatggagcaaatgctgtcgcgagagaatatgctgcaggcattgcgtcgcgtagaagcaaacaaaggagcagcaggaattgacagtgtcagcactcgccagcttcgtgcacatgtggtccagcattgggaaactacaaaagcaaaacttttggcgggtacgtataaaccaagcccagttcgccgcgtcgagattccgaagccggacggaggcgtccgtctgctgggtattccgacggtcatggatcgtttgattcagcaggcaatcttgcaggttctgacccctatatttgacccgacgttttccccacactcttatggttttagaccgaaacgtcgtgggcatgatgcagttcggcaggcccaggaatatatacgagaaggttatagatatgttgttgatatagatctcgagaaatttttcgatcgcgtgaatcacgatatcctgatgtctcgtgtagcgcgtaaagtcaaagacaagcgtgtgttaaaactcatacgggcttaccttaaagcaggcattatggcagaggggattcgagtgcgcagcgaagaaggtactccgcagggtggcccgctgagtccccttctggctaatattctcttagatgatttagacaaggagctcgaacgccgccagcttagattcgtacgttatgctgatgattgcaatatctatgtcaaaacccgtcgggcgggtgagagagttaaacggtccattacaaagtatttggaaaaaaaactgaaactgaaggtaaacgaggcaaaaagcgctgtggatcgtccatggaaacgcaaattcttggggttctcatttacatttcacaaagaagctcggattcgaatcgcgcccaaatcgctgaaacgagtaaaagacaaaatccgtagtctgacgagaggcaaccatttgacatcaatggaaactattattgaagacttaaatcgttatctcatgggatggatgggttattacgcgcttatggacaccccatcaactctgaaagcattggacgaatggatacgacgcagactgcgcttagttttatggagccgctggaaacgcgtacgtacgcgttaccgtatgttacgcgcactgggtctgccagaacgtgatgtgcataaactcgctaatacacgcaagggagcatggcggacctcaaagactccacagatgcataaggcactgggaatcgcatattggaagagtcagggcctgatgtcgctcactgagcgttactttgagatcagacaaggctggagaaccgca

SEQ ID NO: 140 - DNA, 1359 bp, synthetic construct
  source 1..1359: mol_type = other DNA
atgaaagagacaaaaaaatgcgatgaatctcgtcagctgaacatccagacgggccaccttcaaaaagatcgcgtcgaattagagagctatgccaaagcgccctccattagtgtgaccagtgacaatcgccagaatgctcgccgtgagtgtcattacggactgttggaaaatattataagcagtgaaaatctgaacgaggcatttaaacgtgttaaaaaaaataaagggtcacacggtgaagaactgagacagagtattgcggacggcagctataaacccaatccggttcggcgagtcgaaatcccaaaggataacggtaaaattagaccccttggtattccaacggtggtagaccgcgttatacaacaggccatttcacaagtgttaacacctatatttgaaaaaaaattttcggaaaatagctacggcttccgtcccaacagatccgctcatcaagctatccttaaatgtaaagagtatatggatgaaggctatcgttgggcagtggacattgacctggaaaaatatttcgatacggttaatcatgataaactcatcggactgatttacaaggaaataaaggatattagagtaataggacttatacgcaaatatcctaatgctggcgttatggagaaaggccttacgtctttgacccttgagggtgtgccgcagggggggaacctcagcccgttactgtctaatattatgctcaatgagctggatatggaattagaaagacgcggtcttcggttttgccgatacgcagatgactgtaatgtatatgttaaatccaaaaaatcagctgagcgtgtgatgaagagcattacaaagttcattgaaaaagatctgaaactgaaagtgaacaaagagaaaagtaaagtagatcgaccttggaaactgaaatatctgggctataccttttataccaaaaaaggagaaatggggattcgtgtacatcaggtatcaatcaagaaactcaaaggtaaattaaagagtatcacagggcgttccaatgccatgtccatggaactccgcgctgtgaaactgaagcagttgattgtgggttggattggctattttaaattagctgatatgaaatccactttacgcgaacttgatgaatggctgcgacgccgtcttcgcctgtgctattggaagcagtggaaaaaaatcaagactaaacatgacaaccttgtgaagttaggcgttgaaaattggaaggcatgggaacatgcgaacacacgcaaaggctattggcggatttctaactcgccgatacttgccaccaccttgaccaacaaatatctgcgcgaacaggggtttatcacgctctcagaacgttacagccaggtgcgc

SEQ ID NO: 141 - DNA, 1365 bp, synthetic construct
  source 1..1365: mol_type = other DNA
atgagcatgtgtgaagctctgagacagatgccggaacgctcaggacgtgtccctcttgcagatggcgaggcaggtcgggcctccgcgtctgatgaagcgacacgaccccgacatgaaaccggaagcacaggttccgccttactgatggcagctctgactcgtgaaaatctgcagcaggcatggaaacgtgtgcgagcgaataaaggtgccgcaggggttgatgggcgcgacattcctgaaacagcctgttaccttcgaaccgcttggccggtgattcgtgatcagctgctgcagggtacttatcgaccttccccggttcggcgggttactattccgaaacccgacggaggggagagagaactggggattccgacggtgacagaccggctgatacagcaggcgttgcttcaggttttacaacctttactggatcccacattttccgagaattcatttggttttcgccctggccgtagtgcccaggaagccgttgtccgcgcacaagcatacgtccagagcggccgtcgtattgtcgtcgacgtagaccttgagaaatttttcgatcgtgtcaatcatgacatcctcttgggtcgtctgcagaagcgtattggggatgccggtgtgctgcgcctgattcttgcttatctgaatagcggtatcatgcagaacggtgttgtcgtatcgcgctatcaaggcaccccacagggggggccactgagtcctcttttagccaatgttcttctggacgaagttgataaggagcttgaacgtagaagtcactgttttgttcgctacgcagatgatgctaatgtttatgtccgtagtcagcgcgctggcgaacgcgtaatggcccttctgcggaaaatgtatgccaaactccaccttaccgtcaacgaggcaaagtctgcggttgcatcggctttcggacgcaaatttttaggattcagtttttgggtcgcaccgcagggcgaaatcaagtgcaaagtggcagcaaaaccgatggcgacttataaacaacggatccgtcagctgacgcgacgctcggggggacgtagcatggcagaagttgtagagaatttgcgcccgtacgttttggggtggaaagcgtattttcgcctttctcaaaccccgggcgtgtggcgcacgctcgacgaatggatgagacatagattgagagcaattcagctgaaacattggaagcgtggccccacaatgtatagagaattaaaggctcttggagcatcagaaaccgttgctcggcgtgttgcggggaatgcacggtcgtactggcgcaatgccgaccggttattgaagaccattctgaccatagcctactttgatcgtcttcgcgttccacgactgtca

SEQ ID NO: 142 - DNA, 1257 bp, synthetic construct
  source 1..1257: mol_type = other DNA
atgatgatggaacaagtcgtatcgcggcagaatatgcttgcggcttaccaaagagtggttcgcaatcatggatctgcaggcgtcgacggcgtgactgtggaggatttagccgaatactcccgtctgcattgggagcgcattcgtaccgaacttctggaaggacgctatcagccgcaacccgttcggaccgttatgatacctaaaccgggaggcggggagcgggaactgggtataccgacagttatggatcgaatgatacaacaggcagttcaccaggttatgagtccgcagttcgatgcgggatttagcgaagcctcctatggctttcgacctggtcggtcagcgcatggtgctgtggagcgcgcacgcgaacacatgaccgcaggtcatcgctgggttgttgatattgatttagagcgcttcttcgatcgcgtcaatcatgacgtcttaatcgcgcgggtttcccataccgtaaaggataaacgtgtcttgcgccttatcgggtgctatctttcagcaggtttaatgcagggtggggtggtttcaccgagatcggagggcactccacaaggcggaccactgtctcctcttctgagcaatattttgctcgacgtcctcgataaggagctggagcgtcgtggccatcggtttgtcagatacgcagatgattgtaatgtatatgtgcagtcccggcgggcaggtgagcgggtgatgggctcgctccgtgtatggctggaaaaaagactgcgcctgaaaataaatgcatccaaatctgctgtcgatcggccttggcacagaaaattcctgggttattctgtcacgacgcaaaaacgaccgcgtttaaaagtgtctgctgaatcagttaaacgcatgaaacaacggcttcgtgagctgctgcgcattggtcgcggcagatcacttcgtactgtcattgccactgttgccgtttacctgcgtggttggctggggtattatcgtaaagccgaagttcgcaatgtttttgaagatctggatcagtggcttagaagaaaattgcgtcgcataatgtggaaacaatggaaaaaacctaaaacacgttatcggaagctgcgtgcgtatggtgtagccccggatcaggcgcgccgttctgcatggaacggacgaggtccgtggtttaatgctggtgcatcacacatgcatcttgccgttccaacgaagctgctgcgtaactggggattaccatcactgcttgatgaacatcagcggcttcagagactg

SEQ ID NO: 143 - DNA, 1452 bp, synthetic construct
  source 1..1452: mol_type = other DNA
atgatctccatgcaaaccgtcaaagccgaagtaagtgaacgggccgccgagacgcaatcgacggaccgaaagagtacaaagctgccactgggcgctgacgttggcgccgccacgagtgagcaaacaaagtctgaggggcattctcttatggaacaagtagtcgaacgctcgaatctctggttagcgtatcaacgggttgtccgaaataagggtgcgcctggggtggatggtttaacagtaggcgaattcaaggattggctgaaaatgcactggccaagtgttaagaaagcacttctggaaggtgattacctgccccggccggtacgacgggttgacatcccaaaggccagcggcggtatgcggactcttggggtacccacagtcgttgaccgtctgattcaacaagctctgcatcaagttctgcaaccgctgttcgaaccgacgttttcacaaggttcgtacggttttcgtccccgtcgcaccgcccaccaagccgtacgtcgtgcccagtcatatattcgtgagggcaagcgttgggtggtcgatctggacttggagaagttctttgaccgtgttaatcatgacgtccttatggcacgggtggcgagacaagtcagagacgcgcgcgtgttgaagttaattagacgcttcctggaagccggaatgatgcgcgaggggttagtcgagccacggagcgagggaacgccccaaggtggccctctgtcacctttattgtcaaacattctgttgacggatctggaccgcgagttagagagacgaggtcttgcgttctgccgatatgccgacgattgtaacatatacgttggctcacgtgttgctgcagagcgtgttatgggtggtattagaaccttccttgaagaggttttacgactccgtataaatccagcgaagtcagcggtggcgcgtccctgggaacgtaagttcctcggtttctcgttcactgctcagagagaagcccgcttaagaatcgcactccaatccgtgcgtagattgactgaacgtgttcgggagttattaagagctggccggggtcggagtcttgcccatactattgacactctcaaccctttactgcggggatggatcagctacttccaattgactcagtgtaagggtgttttagaggagcttgacggttgggtacgccgcagattgcggtgtgttctgtggcgacagtggaagcgtagccgcagtcgtgcaagacacatgcgggccttgggtttagacgctgcccgcgcacgatgtagctcacaaaatgggcgtggcagttggtggaatgcaggggcaagccatctgcaccaggcccttccggcagcttacttcaaattaggtgcggggttagcagtagctagagccactgccactccggtttgcagtctgaatcgtcgcatgcgcaatagaacgtctggcggagtcggcggtcgacgtgca

SEQ ID NO: 144 - DNA, 1401 bp, synthetic construct
  source 1..1401: mol_type = other DNA
atgaaagaagggaaacagaagatttcgaaagacacctgtcaacagaaagatcgcgcggagcccgatggctatgcgggcgggcagacattcatctggatgaccgaaaataacattactaatgtcgacaactcaaagtacggtttacttgagtacattttgtctccacaaaacctgaacgcggcctttaaacgtgtaaaaagtaataaaggttccggtggcattgacaaaatggaagttgaatcgctgggcgactaccttatttgccacaaagaatccttgatccagagcatcttagatggtaactaccggccgaatccggtccgccgcgtggatatcccgaaagataatggtcagaaacgcagcctcggtattcccacggtggtcgatcgcgtggtccaacaggcgattgcgcaagttctgtcgccgatctatgaaaaacaattttccccaaattcttacggctttcgcccgaaacgtagcgcccaccaggctttaatcaagtgtaaagaacatattacctcagggtataagtatgccgttgacatggatctggagaaatttttcgacacggtgaaccagtcaaaactgatcgaaattctctcccgtaccgtgaaagatggccgtgtggtatctttaattcataagtacctgcgcgctggcgtggttgttcgtaataagtttgaagagagtaaaatgggagttcctcagggcggcccgctgtcgccactcttgagcaatatcatgctgaacgaattagatgaagaactggagaaacgcggtcaccatttcgttcgctatgcagatgatatgctgatcctgtgcaaaagtattcgctctgcgaaacgcactaaagcaacgattattgcatacattgaaggccgcctcttcctgaaagtaaacaaggacaagacctgcgtggcctatatcagcaaaatcaagttcctggggtatagcttttacgtcaataagaagaaaggtcgtctgcgtctgcatccgaaaagtctggccaaaatgaaagagaaaatccgtgctttaactagccgtagcaatggatggggcgatgcgaaacgtaaacttgagctcaaacaatacatcaccggatggcttaactactttaagctggccgacattaaaagtctgctgtcgcgtattgatgaatggtatcgccgccggctgcgtatggtaatttggaaacagtggaaacgggtgcgttcacgtggccgcaacctgattaaacttggtattgcaaagtataaagcgtgggaatatgctaacacgcgtaaagcctattggcggacctctaacagccctatcttgaacacatccatcacgaatgaacgtttgaaacaggcagggtatattttctttgcggattattatcgcaaagtgaacggtgtcaat

SEQ ID NO: 145 - DNA, 1395 bp, synthetic construct
  source 1..1395: mol_type = other DNA
atgaaagggcgtatgcagaaaatttctaaagatacttggctgcagaaagaccgtgctgagccggatagctatgctgcggggcagacctttatgcgtattacggagaacaatctgactgatgtgaccacgttggaagatggattgctggagcaaattctgtcgccatcgaatcttaatcgcgcctataagaaggtgcgtagtaacaaaggtaaaggcggcgtggacaaaatgggtattgaacacttgcaagactatcttgtagagaatcgcgtggaattactgcagtctatccgcgatggcaagtatcgtccaaaaccggttcgtcgtgtcacgattccgaaagagaatggtaaaaaacgtctgttaggtctgccaaccgtagtcgacaaagtgattcagcaggcaatcactcaggttctcagcccgatctacgaaaaacagttctccgcatacagctacggctttcgtccggggcgcaatgcccatcaagccctgaaaaaatgccgtgattatatttctgatggtcatatctacgcggtggacatggatctgcaggaatttttcgataaagtaagtcacagccgcttggtagaaattctgagccgtaccatcaaggacggccgcgttatttctctcattcataagtatcttcgcgccggcgttatgattggtaataagttcgaagaaacggaactcggtgtcccgcagggcgggcccctgtcacccctgctgtccaacatcatgttgaacgaactggacaaagagctgcaacgtcgcggtcaccgcttcgtccgctatgcggatgatctgatgatcgtgtgcaaaagtaaacgtagcgcgggccgcacccttcggaacatcatccctttcatcgaagataaactttttctgaaagtgaaccgcgagaaaaccaacgtgagtcatgtttccaaaatcaagtttcttggacacaccttttatcgttcacatggtaaaggccgtttccgggcacatcctacgtcgattcggaaaatgaaacagcgtttaaagcaattaacatcccgttcgaatggctggggcgaagatcaacgcaaggaaagcttaaaccactacgttcgtggatgggtcaactattttaagatggctgacatgaaatcattactgcggaaaatcgaccgctggtaccggcgtcgtttgcgtatgtgtatttggaaacagtggaaacgcatccgcaccaaaggcaaaatgctgattaaactggggctgaacaaatggaaagcatgggaatacgccgatacccgtaagagtcactggcatattgcgaatagctttattctcacacgcaccattactacacatcgtctccgccaggcgggttacccgtttctgctggattattattcaaaagttcgcacg

SEQ ID NO: 146 - DNA, 1410 bp, synthetic construct
  source 1..1410: mol_type = other DNA
atgcgtggcgtgaaacccaccatggaaaagaaactgaccaaaatgaaagtttctaaccagtctggctacaccggtttttcgattttcagcttgggggagatttgtttagaagaagttactgatggttataatctggagaaggcgttgaaatgtgtggcgcgcaataaaggtgccccgggcatggatggagtcgaaaccaaagattatgccctgcatcggcaaattgccggttttaaagatcttatcgacgatatttccgccggtacatatcgtccaaaaccggtcaaacgggtgtatatccctaaagaaaacggcgataaacggccgctgggtattcccacagttgaggatcgtgtggtgcagcaggcactggccaacattctgagcaagtattacgaagaggaattttcagacaacagtttcggctaccgcccgggccgtggttgccgtcaagcggttaaacgcgctttgaaatatgtaaacggtggccgccagtgggtaatcgaccttgatctgtcgaagttttttgacaccgtcaaccactcaaaactgctgcagatcctttcagagaaaatcaaagatgggcgcgtgatttcactgattcataagtttctgcgcactccaatctatgaaaatggggtggtaagcccgaaaagtaaacaaggtaccccgcagggcggaccggtatccaccattctcgcgaacattatcctgaacgaatgcgaccagatgatggacaaagaaaatattaagtttgttcgctatgcggatgacatgatgatcttttgcaaaagtaaagaagctgccgaacgcaccctgaacaaggtgacaaagttcttagagaaaacgctcttcctgacggtcaataaagaaaaaaccaagatcttatggtacacgcatgggacacagtttttgggtttcacgttgtcccagtatgtgccaaaacacattaagaaaatcgcaccgaaatgtaaagtttacgttaaagtccatccgaaaaaacgtgagaaatttcaaaaaggcatcaaagaaaccctggatcgtcgcgcaccgggcgggattgaagaaacgaagaaaaagtttaaccaaaaaattcggggatggttcaactacttcaaaggcagcattccacagaagtggatggaagagacggatgcatggatgcgtcgccgtatccgtcagatgtattggaaacaatggaaaactcctcagaatcgtatggaaaatttcagcaaacttaatcccaaaagtccttctcggcgtgattacgcgtactctaacaatagctattggcgcatggctcgcacgaaacagatgcacaatgcactctcgaaccgtaccctcactagcatgggctggctgtcgttacaggaactgaacgcgcagtacctgcaagagatgtccggaaat

SEQ ID NO: 147 - DNA, 1272 bp, synthetic construct
  source 1..1272: mol_type = other DNA
atggagctgttagaacagattctgagtaatagtaaccttaacgaagcctacaagaaagtttatcgcaataagggggcgtctggagtagatggcgtgacaatcaatgagttgaaagaatatcttcagaataacaaacacaaacttctctctgaaattcgtgcacgtaagtataaaccgcaaccggtgaaacgtgtggaaattccgaaagcatccggtggtgtgcgcaaactcggcattccaactgtggttgatcgcgttatccaacaagcgatcaatcaagtgttaacgccgatctacgaggagcaattttccgaatccagctacggctttcgccctcgccgtagcgctcagggcgccgtcttacgttcgctggaacttattaacgatggttacgattgggtggtggatatcgacctcgaacgttttttcgataccgtccatcatgaccgtctgatgaatatcatttcccggactatcgaagatggtgacgtgattagtctgattcgtaagtttttagtaagtggtgtaatgattgacaacaagtatgaggataccatcattgggacccctcagggtggtaatctgtcacccctgctgagcaatatcatgctgaacgagctcgacaaagaactggaaattcgtggcctggattttgtccgttacgcggatgattgcatcattctcgtatcgtcaaaaaaatcagctaatcgtgtaatggcaagcgttaccaatttcatcgaaaaaaagctgggcctgaaagtgaacgtcacaaagagtaaggttgatcggccgaacaacatcaagttcttgggctatggttactattatgacggtaaagaaggaaagtatcagttgcgcccgcacgaaaaatctattcagaaattcaaacggacgttaaaacgtttgaccaaacgctcgtggtcggtgtctctgaactatcgcctgtttaaaatccgccaggtcattatggggtggatccagtactttaagtatggcaaaatgaaaagcaaacttaaagttatcgacagcaaactgcgcgcccgcattcggattgtcatttggaaacaatggaaagttccaaaaaaacagatcaactcactgatgaaactgggcatcagcttggacgaggccaaaggcattacgtactgtcgtaaaggctaccagttcatcggacactcgaaagttatccagaaggcgattaacaatagccgtctgaaaaaacgcgggttaacgtccgcgctggatcattatctgaaagtgcagaccgtcatt

SEQ ID NO: 148 - DNA, 1272 bp, synthetic construct
  source 1..1272: mol_type = other DNA
atggagctgttgacccagattttgtccaacagtaatctcaacgaagcatacaaaaaagtctatcgcaatcagggtgcgagcggggtggatggtgtgaccattaacgagctgaaagagcaccttcgtgagaataaacacaaactgctcagcgaaattcgcactcgtaagtataaaccacagccggtaaaacgtgtggaaattcctaaagcgaacggtggtatccgcaaacttggaatcccaacggttgtcgatcgtgtcattcagcaagccatcaaccaggtgctgacccctatctatgaagagcaattttcagatagtagctacggtttccgcccgttgcgtagcgctcaaggtgcggtcttacgctcattagaattgattaatgatggctatgattgggtggtggatatcgatctggaacgcttctttgatacggtacatcatgaccgtctgatgaatatcatttctcgcaccattaaagatggcgacgttatctcactcattcgtaagtttctggttagtggcgttatgattgacaataagtacgaagacacgattattggaacgccgcagggcggcaatctgtccccgctgttaagcaacatcatgcttaacgaactggacaaacaactggagatccgcggcctgcactttgtgcggtacgccgatgattgcatcattctggttaaaagtaaaaaaagcgcagaacgtgtaatgacttctgtgacgaactttatcgaaaaaaaattaggcctcaaagtcaacgcgaccaaaagtaaggtcgatcgcccgaataacattaagttcttgggatacggttattactcggactttaaagaagggaagtatcagctgaagccccatgaaaaatcgattcaaaaattcaaacgtaagcttaaacgtttgacaaaacggtcgtggtccgtttctttagactatcggctgctgaaaatccggcaggtaattatggggtggattcagtactttaagtatggtaaaatgaaaacaaaactgcgtggtattgactctaaactgcgcgctcgcatccgtgttgtgatctggaaacaatggaaggtgccgaagaagcatatctcatccttaattaaactcgggattctgaaagatcaggccaaaggcattacctattgccgtaaaggctatcagttcatcggccatagctgtgtaattcaccgtgcaatctccaattcgcgcctgaaaaaacgcggcctgactagcgccctggatcattaccttaaagtgcagaccgttatt

SEQ ID NO: 149 - DNA, 1269 bp, synthetic construct
  source 1..1269: mol_type = other DNA
atggaattactggacaagattttggaacgggagaacctcaacaaagcatacaaacacgttaaggcaaacaaaggcgccccgggtgtggatggagtgactgttgatgaagcatatgaaaacattcgccagaataaagaaaaatggctgcatcagattcgtaaacgtacctacaaaccgcagcctgtgcgtcgtgttcagattccgaaagaaaacggtaaaatgcggaatctgggcattcccactgtgtttgatcgtattattcagcaagcgatggtacaggtactgagcccgatttttgaagagcaattttccgaaacctcttacggcttccggccaggacgctgttgcgaaaacgcggtggtaaaagcattagaatatctgaatgatgggtatgaatggatcgttgatatcgatttggaacgcttcttcgataccgtggatcaggatcgtctgatcaatattatcatgcgcacgatcaaagacggagatgtggtgtcgctgattcgcaagtatcttagtgccggcgtaatggacaaaggcgtcaccaaagcgaccgagaaagggacgccgcaaggtggcaatctgtcccctttactgagcaacattatgttaaacgagctggacaaagaactcgaagcgcgtggcctgcgcttcgtccgttatgccgacgattgtattatccttgtcaaaagtgagaaagctgctaatcgcgtgctggagtccatcacgaagtacatcgaaaagaaactgggtctgaaggttaatgctgaaaaatcgaaagtgacgcgtccgacgaaaacaaagtatctgggttacagcttctggaaagatacaaaagggaagtggaaacccaaaccgcacttgaaatcttatcagaaaattaagcgtaaacttaagcagctgacctgccgccgtatttcaatctcacttgacgaacgcatcaagcagattaattacgcgattcgcggctgggtcaattattttcgtatcgcaaacatgaaaaatgcgatccaagagatcgacgagcacctgcggactcgtgttcgtgtgatcatttggaaacagtggaaaaaagctagtcgcaaagaaaaagccctgttacaactgggtgttaaaccagatattgcccataaccttgcgaacaccagcaaaggctatcaattggtcgccaaaaccgactggctcaaatttgcgatcaacatcgaacgtctgcgcaagcgcggtttgatttttctcagcgatcagtaccagaaagttcatgtcgagatt

SEQ ID NO: 150 - DNA, 1389 bp, synthetic construct
  source 1..1389: mol_type = other DNA
atgaatgcggaaaatctgattgatgaatcatgtcctcaacgtacgagtgcggaacatgaaaaatacgccggggcgcagtccgccgccccgcgtgaaagcgaagctgaagatcgcgcggacctgctggagcgtatccttgatcgcgacaatatgaatgaagcgtttaaacgcgtgcgcgcgaacaaaggcgcgccgggcatcgatggtatgaccgttgaggctgccttaccctggctgatcgagcatggtaaagaactgattgacagcctgcgtgacggcacctataaaccgcagccggtgcgccgcaaggaaattccaaagcctgatggtggcatccgtaaactgggaattcccaccgtgattgatcgcatgattcagcaagccatcacacagcagctgaccccgatctacgaaccgatcttttctgacaacagctatgggtaccgtccgcaccgcaatgcgcagatggcgatccgcaaagcaaaagagtatgcagacgaaggctacaccgtggccgtcgaaattgatctgaccaagtattttgacacgctgaaccacgatctgctcatgaacactgtccgtgaagaagttaaagacaagcgcgttctcgagttaattaaaaaatacttgaaatcaggcgtcatggctaacgggctgctgatcaaaacagaagaaggttcaccacaagggggcccgttgtccccactgttggcaaacatctatctgaataagtatgatcatgagatgactcgccggggcgtcaaggaaattcgttatgccgatgatatcgttttatttgccaaaagtaaacgggcaggagaacgcctgctggagtcttctcggcgttaccttgagaaaaagctgaaactcaaattgaactcggagaaaagcaaagtagtaagcacgtatagtccgcgtaagttcaagttcctgggttatgcactgggcaaaagtcgccaaggtaccttcattcgcatccacgctaaagcgctgaagaaagcgaaagagaagttgaaagagctcacgtcgcgctcccagggtcgtaaaatttgcgaggtgtttgcccgcctgaaacgcttcgtgaacggttggattaattactttggaattgcgcggattaaaaaaacccttgaagattgggatggctggttgcgccgtcgtattcgtatgtatatttggaaacagtggaaaaaaactcgccggcgtaaagaaaaccttatgaaactcggcgtacctgaatggcgtgcatgcgaagccgcgtactcccgtaaagcatattggcgtagcgccaaacatgcgtcagttcattcggctttaacgaatgaacgtttagctcgtgcaggttattacagcttatctgaacggtacgaatcgctgcacctttatgat

SEQ ID NO: 151 - DNA, 1377 bp, synthetic construct
  source 1..1377: mol_type = other DNA
atggttcgctcacgtaaagaacgtatgcgtgaagaagataaaagtcgccccaacacgcgtctgtgtgagcaattaattagtctggcaaatattcagcaggcggtcaagaaagtaatgcagaataaaggttcagctgggattgatggcatggaagtgacggagcttccgtcgtatcttgaagcgaattgggccctgattcgtgagcaaattgtgacgcgtacttacaaacctaagccggtgctgcgccgtgagattccaaaggataatggtggcatgcgcctgctcggtattccaaccgcggtagatcgtgtgatccagcaagcgttggtccaggttctgaccccggtctttgaacctaccttttctgacttttcgtatggatttcgtccggggcgtagcgccgaagacgccgtgcgcctggctcagacctatatgagcgaagggtacaagcacgttgtagatcttgacctctcgaagttcttcgatacggtggaccatgacatcttaatgggcctcatcgacaagcacatggatgataaagacgttcgtcgtctgatctatgtctatttgaaaagcggtgtcatgacgaacggctccatggccgtgaccgcgctgggtaccccgcaaggcggcccattaagcccgttgttatctaatgtttatctgacaccgtacgatcgggaattggagaaacggggtctgcgtttcgtccgctacgcagacgattgcaacatctttacgaaaagtaaaatgtccagctatcgtgttcgcgactccgctaagagttatcttgaacggaaactgaaactgaaagtgaacatggagaaaaccgaggcgcggcgtgcagtcggcagtacatttctgggtttcacttttcgcacttatggcaaacgtggtaaacttgggatgacagtgccccatgaaaaaaaactgaaaaagctcgaggatcgcattcgtctggtgaccaagcgcaatcgcggcgtttccattggcatggttattcgtgatctgaactcaattttgcgtggttgggtaggctactttgcccgctctgcaattaaaaattatttggaacgtctgatggaatggatccgccgtcgtatccgccagtatctttggaaacaatggaaaagcggaaaaaaccgcaaacaccgcctgcgtcagctcggtgtagatgaatggaagctgaaaaaatggaaactggggtcgaactcttactggaaaatggcgggaaccatgaactacctgatcgacaaagaatcaattcatggccgctatggtctggttgatatcttaggatattacaataaactgcatgcccagcggatggaaagcgatggtatcgtgttagatgtgcgctacaacagcttattcggc

SEQ ID NO: 152 - DNA, 1302 bp, synthetic construct
  source 1..1302: mol_type = other DNA
atggaattgatcgaagtgattctgagtaaagaaaatctgaaccgggcgtataagaaagtcgtggccaacaaaggtgcatccggcgtcgatggcgtgggggttgaagagctgggggactatattcgtgaaaacaaagatgtaatcattacatccattcgcaatcgtacctacatgccgaaaccggttcgtcgtgtgtacatccctaaagaaaatggcaaacagcgccccctcggcattccgacagtgttagaccgcacgatccagcaagctatcgctcaaccaatttgggatatctatgaagaaatcttctctgaatatagctacggctttcgcccaggtcggtcgtgccatgacgcgatccgtcaggccctgtactacctgaatgacggatatgagtgggttgttgacattgacattgagcagttctttgataaggtcaatcacgataaacttattcagatccttggggaacaagttaatgattcgacgaccttaaacctgattcggaagtacctcaaagccggtgtaatggagaaaggcctcgagaaagcaactatcaccggtgtacctcagggtggaccgttaagcgttgtatgctctaacatctatttggataaactggataaggaactggaaaagcgtggcttgcgcttcacccgctacgcggatgatgtcctgatttttacgaaaagtgaaatggctgccaaccgtgtgatgaaaagcatccgctcatggctggaacgtaaactgtttcttaaagtcaacggcaccaaaaccaaagtggtacgtccaacgcgctcgaagtatcttggttttacttttgtgaaaaattcaaccgagtggaaagtgcgtccgaccaatgagaaaaagaaaaaactgaagaagaaactgagcgagtatcttaaacgcggcaaagcggtagcacgtcccttagcggttactattaaacgcgtcaacgaaattgttcggggctggattaattactttcgcattggtatgatgaaacagttcatgcaggagctgggcgaatggttgcgccataaaattcgtgtgattgtcgtcaaacagtggaaacgtccgaaaacgatctatcggaatctctcttatctgaattggaagtataagatcggttgtaaacaagaagaaatttttaaagtggcgaactcacgcctgggttggtaccgtcgctgtggaatgagcgtggttaacttcatcatctccaaagacttgctggaaaaccgtattaaggatggggtgggcctgctgaacccgttaagttattatctggttaaagtgggtatt

SEQ ID NO: 153 - DNA, 1416 bp, synthetic construct
  source 1..1416: mol_type = other DNA
atggacgcggagcgtcaacagggtcgcgcctaccagctcactttcaactttgaaggtgacgcggagacgctgcggcatgatcagggcggcgatgacggaattggtaccgcacgtcccgaagaaccgcagacaagcactgcgtccgatccagcacgcgctctgacggagcgtctgatggaagaagtgacgcgcccggagaatcttaatcgtgcgtaccgcaaagtgaaagccaacaagggcgcccctggtgtagacggtatgaccattggcgaccttcgtgcgtggattgctatgcataaagaagaactcattgccagccttctggatggctcatatcgcccgcagccggttcgtggagttcagatcccgaaaccaggtggtggggtgcgccaattaggtatcccaaccgtggtggaccgtctggtccagcaggccatccttcaggtgctggagccgttactggatcccaccttctccccttcatcatttggctttcgcccaggacggggcgcgcatgatgcattgaaacaggctcggcagtatgtcgcggacggacgcgtgattgtcgtcgacgtagatctggaaaaatttttcgaccgtgtcaaccacgatatcctgatggcacgcctggctcggaaggtagccgatcgtcgcctgttaggcatcattcgccgttttctgcaggcgggcttgatgcaggaaggtgtttgcgtggctcgccacgaaggcactccgcaagggggcccgctgtcgcctctgttagcgaacttgctgctggacgatcttgataaagagctggaacgtcggggtcatcacttctgtcgctatgccgacgattgcaatatctacgttcagagcaaggcagcggggcaacgcgttctgggttccgtaacccgtttcctcgaggtggttctgcgcctgcgtgtcaatcgtgataaaagtgaagttgcgtacattgaagaacgtaagttcctgggttatcgcctgctcagcggcggtcggctggggattgcgccgaaaagtctcgagcgtgcgaaggatcgtattcgccagattacccgccgtaatcgcggggtaagcgtggatcgtatgacctcggaattaaactcgtttctgacgggctgggttagttattttcgtcatgcagcatgtaaaagtcaccttacagaattagatggctggatccgtcgcaaactccgttgcgtgcgtctgaaacattgtaaacgctctaaaacgttggccgattttctgggctctcacggcgtcgcccaacatacggcatgggtgaccgcactgtctgggaaaggctggtggcgtttgagcggatccccggctgcccatcaagccatggatcaacgctggtttgcgtcgttgggtttaatcaacctggctcaccgtcatacaaccttgaaccgt

SEQ ID NO: 154 - DNA, 1470 bp, synthetic construct
  source 1..1470: mol_type = other DNA
atgtccaaagccgagtatcggcagctgacatttgcgttcgctgactctcctcagggggccggtccggcggctctgaccgacgtgtcggtcggtaaagcttggctggccttaactgcggaagttaaggaaggcaatgattccgccgcatggaccgcagacacgggtcgtctgctggagtcggcgacgagtgccccaaaccttgcacaggcgttgttgaacgttgcacgcaacaaaggcgcggccggtgtcgatggccgtagtgtggatgaagtagttgccgccggcccgcgtttactgccttacctgcgccgggaactgctggcggggacctatcgtcccggggatatccgtcgtgtgtggatcccaaaacccggcggcggtcagcgtggcctgggcattccgaatgtggtcgatcgttgggtccaacaagctgtgctccaagtgctgcaaccaattttcgaaccgacctttcatgcatctagccatggcttccgcccgggccgcggagctcagactgcaatcgatgaagctaaaaaatacctggcagaaggtttctgtttcaccgttgatatcgatctgagcaagttctttgaccgtgttcatcaccagcgtttgctcaaccgcctcgcccaacaggcgtcagacggccgcattttgaaactggtgcaccggatgctgaaggcgaaagtggttctgccggatgggacgcgcattaccactgaagagggagcgccgcaaggtggccccctcagccctattcttagcaatattgtcctggacgagctggaccgtgaattagcacgccgtggacttcgcttcgtgcggtatgcggatgattttagcgtatttgttcgcagtgaacgcgctggtcgccgtgttatggatagtatccgcaagttcatcgaagggcgtttgcgtctggaagtaaacgaagagaaatcctcagtctcacgcccgaacgatctcacgtttctgggttttcatcttggtaagagtccggacggcaaagtgaccgtcaccccaagccaacgtacaaaagaacgtatggacctgcgtattcgcgaactgacaccgcgtacctggggccagtccgttgccgcttgcattgaaaaagccaattcgtatcttcgcggatggtttggttattttcgtctgtgcacggaagaaggtgtgctcagctttggccgttttgatgcacacatccgccgtcgcatccgggcggtaattgtgcatcagaaaaaacggcctcgccatctttatcgtcacctgctggatcgtggggtatcttgtggaatggcggcgaaagcggcctttcagcgccgtggtttgtggcatcgctctatttcgttcggcatgcacaaagcctacccgaatgcatggttcgcggatcgcttaatgtcattgaaagaggagtggcagcgtttacacccgccagagcaggtgagctacaagcagttattactgtttgag

SEQ ID NO: 155 - DNA, 1413 bp, synthetic construct
  source 1..1413: mol_type = other DNA
atgggggcaggggtgcccgaaaaaaagattgaaattagcgaagtcgacctgcatggtggaagccgcaaactgccgcgtggacgtatctctggtgcgaatttccctggcaccgaggggcagccggatccacggaaaccagatctgattgaaatgatgctcgaacgtggtaacctgttggaagcattgcaccgcgtggaatcgaatcgtggtgctgcaggggtggacggtttaaccgtgtcgcagctgcgccagtatcttcgcgttcattgggcaggaattaaggaacaactgctgaaaggcgagtatcagccgcgtccggttcgtcgtatggacatccccaaagcgggtggcggtacgcgtatgctgggcattcctaccgtactggatcgtttgatccaacaagcgctgcaccagatcttaagcccgctgtgggagccgtggttcagtgcgcacagttatggttttcgccctggccgttccgctgcgcaggccatcaaaacagcccagaagcatgtgcagtctggccatcgctgggttgttgatatggacctggaaaaatttttcgatcgcgttaaccatgatgtactgatggcgcgggttgctcgccgggtcaaagaccagcgtgtactgaaactgatccgtcgctacctggaatcaggcattatgttagggggcatggtggagcagcgtacagagggcacaccgcaaggcgggccgttatccccgctgctgtctaatatccttcttgacgacctggataaagagttggaacgtcgccgccataagttctgccgttatgcggacgattgtaacgtctatgttggtagccaacgcgccggagaacgtgtcatgaaatccctgacgcaattcctgcaggcaaaactgaaattaaccgtgaacccgaccaaaagtgccgtcgataaaccatggaaacgtaagtttctcggcttcagtttgactgcagaacgcggtattcgtattcgcgtggcgactccgtcagtcaaacgcctgcaggataaactgcgcgccaagtttcgtgagggccgtggtcgcaatcttcgtacctttattgagggcctgaaaccgcttctgcgtggttgggccaactacttttcagtagcggaaactcgtcaggtgtttgagaaattagatgaatggatccgccgtaaacttcgttgcatggaatggcgcaagtggaaacgccctaaaacccgtctccagcgtttgacggccttaggcttagatcgcgaacgggcgcggttgggcgcctttaacggtcgtggcccatggtggaacgctggcgcttcgcacatgaatgcggcactccccacgagctactttcacaaacttggtctgattctgctcacggaagaagtggattggcaaaccgccctgcggaccgctcgcagcctc

SEQ ID NO: 156 - DNA, 1392 bp, synthetic construct
  source 1..1392: mol_type = other DNA
atgcggaccgatgacgccgaagcatatgtttcggcggcctcgacggggaaaggccgtcgcaaccgcttaggttcgggtgccggagcagaagtgcggacggctgctgttggtcgtactaaacccgaggcgctccgcctgatggaagcggccgtcgagcgtagtaacatgctgtgctcctacgaacgcgttgtgaaaaataaaggggcgcctggtgtggatggcctgaccgttgctgcctttaaaccttggttgcaagctcactggccacgtgttcgtcaggcactgttggcaggtgagtacatgcctgcggccgttcgcaaggtcgaaattccaaaaccgcagggcggggttcgtatgctggggattccgacggttttagatcgtctgatccagcaggcattacaccaggtcctgcaaccgctgtttgagccagagttctccgagtcaagctatggcttccggccgggccgcaacgcacatcaggcagtaaaggcggcgcgcgggtatgtcgctgaaggcaaacgttggaccgtggaccttgatttggaaaaatttttcgaccgcgtcaatcacgatgtacttatggcacgtgtagtgcgtaaagtgaacgacgagcgggtaagcaagcttattcgtcgttatcttgaagcaggtctgatggaaggtggagtggtgagcgcgcgtactgaaggcaccccgcaaggcggtccgttgtcccccttactctcgaacattttgctgacggatctggatcgtgaactggaacgccgtggtcatggcttttgtcgctatgctgatgactgtaatatctatgtaggcagcaaacgttcaggccagcgcgtcatgcgtgcgatcacagcgtttctggaacagcgcctgaaactgaaggtcaatgcggctaaaagtgccgtggcccgcccatggcaacgtaagttcctggggtactctatgacctggcacaaaaagccgaaacttaaaatcgcgcatcaatcacgtgagcgtttcgccgaaaaagttcgtcgcacgttacgtgaagcccggggtaagagtctgaaacgcgcggttgaacgcctcaacccggtgctgcgtggttgggtggcgtactttcgcctgaccgaagtaaaaggtgtgctcgaagaactcgatggctggctgcgccggaaactgcgggccctgctgtggcgtcgttggaaacgcaactacacccgtgcgaaaaatctgatgcgccgtggtttaagcgagcgtcgcgcgtggctgtcagcaacaaatggccatggaccgtggtggaatggcggcagctctcatatgaacgaagcctgcccgaaaagttggtttgaccgcatgggacttgtcagcttattggatactcagcgtcgcttttcttccgtgtct

SEQ ID NO: 157 - DNA, 1401 bp, synthetic construct
  source 1..1401: mol_type = other DNA
atgaccactgaaaatcgtcgtaaggaagaagcgaaaacggaagaatcaggccggaatccggtgctgcctctgaactcggccatggttgatgaaactaaacgggaagaaagtttactcccggataaccaacggtacattccgattcctaaaattgaaggagttgtttcggattataatatccaagaggcgacgaaagctgtgattcgtaacaaaggggcgccgggaattgatagtatcaccacggaagagatcgagggcattctgcagaaagaatggcccaagattaaacaagagatcttagacggcaagtaccgcccaagcccagttcgtcgcgttgaaatcccaaaaccggacaaaaatggcgtccgtaaacttggcatcccgaccgtcatggaccgtattattcagcaagcaatctaccaggaactgatgtttacattcgaggcaatcttttctgagaatagttatggttttcggcgttcccgcaatgcgcagcaagctgtgctcaaagcgcaaggatatatccaggaagggtacgaatgggtggtcgacatggatcttgagaaattctttgacaaagtaaaccacgatattctcatggccaaagttgcgcgccgcatcaaagataagaaaatcctcttactgatccgccgctacctgcaggcgggcgtgttagaaaacggtctggtaaagccttcggaagagggtacaccgcagggtgggccactttccccgttgttgagcaacattatgttggatgattttgataaggaattagagcgccgcggcctgcggttcgtgcgctatgccgatgattgtaacatctacgtgaaaactgaaattgcaggacagcgcgtgatgaaaagcgctatcaagtatctgacaacccgtctgaaactgaaggtaaacgaagaaaaaagcgccgtcgcacatccgtgggagcggaagttcctgggttttaccttcaaaaaagaagaaccggggaaaattgccattcatgagtcccgtatcaaacgtttgaaagacaaaattcggggtctgacgaaaaaaatgcgtgatggtaatcttacggtaagcattcgtaagtttattatgcctattgtccgcggctggaccaattatttcggcatcgccgaggaacagggtatttttgcgagcctggacggttggattcgccgtaaaatccgcggcattcagtggcgccagtggaaagaaccccgcacccgcttcaaaaaactgaagtcactgggcattaaagaacagaccgcgcgtaaccatggttattcttcgaaagggccgtggaaaatggcacgttcccacgtgatgcacaaagtcttttcaaacagcaccatcgaaagtatgggctatattcccatggccaagctggtttgcgctcgttct

SEQ ID NO: 158 - DNA, 1227 bp, synthetic construct
  source 1..1227: mol_type = other DNA
atgtacgaagcactgcggcgcgtcgaaggcaataaaggtgccgcgggcatcgatggaatggaagtaaaagatcttcgtccgtatctgaaagcccattggcaagaaatcaaagggcagctgttagaaggtacctataagcccaaaccggtgcgtcgtgctgaaattccaaaaccggacggcggtgtccgctttctggggattccttgcgtgattgaccgcttaattcagcagtcactgttacaggtactcacgcctattttcgaccccggttttagcgaacactcatatggttttcgtccgggacggggcgcccatcaggccgttcagaaagcgaaagaatacgtcggcgagggttatacctatgttgttgacatcgatctggaaaagttcttcgaccgcgtgaatcacgatgcgttgatggcgcgcgtggcacgcaaagttgaggataaacgtgtactcaaacttatccgtgcctaccttaatagcggcatcatggtcgatggcgtgtgcattcgcaccgaagaagggaccccacaaggcggtccgctcagtccgttgctgtccaacgtcatgctggacgatcttgataaagagctggagaagcgtggtcatcgtttcgtgcgttatgcggatgattgtaatatctacgtgaaaagtcaacgtgcaggagaacgcgttatgggtaatgttaaacgttttctgggcgagcgcctgaagttaaaggtgaatgaggcaaaaagtgctgtgggcaaagtaaacgcccgtaagtttctggggtttacactgtctagcggcaaacgctcgcgcatccgcatcgcgagcaaagctctggagcgtctgaaagatcgcatccgcgaattgactcgtcgttcttggggtattcgtatgggcgaacgcattcggcggctgaacgtctatttgcggggctggattggttactaccgtttggcggaaagcctgtccgtgttgaaccaattagacggctggatccgccgtcgcctgcgcgtttgcttattgaaacagtggcgcaaaccgaaggcgcgttggcgtaaccttgtgaagcttggtgtttctgaggaatgggcctatatgatttcggggtcgcgtaaagggtgttatcgtctgtccctgactcaccagctgaacaaagcgctgggactcgaatactggaaaaaacagggcttactgtcactggctgaaacgtatctgaacattcgtattgcactc

SEQ ID NO: 159 - DNA, 1317 bp, synthetic construct
  source 1..1317: mol_type = other DNA
atgaccgaggcagttggggaaggagtttgggagcaggtatttgaacgcaaaaacctgctctcagcattaaaacgtgtggaagccaacggtggcgcgccaggtgttgatggcatgactgtcgaggccttgcgtccatatctgaaagctcactggctggaagtgcgcgcagctctggactgggggtcttaccgcccttccccggtccgtcgtgtcgaaattggtaaaccggatggtggcgtacgcctgttagggattccaacggtagcggaccgcctgattcaacaggcgattggacaggtcctgacgccgctctttgagcctgtgttcagcccgcattcctatggatttcgtccgggacgtcgtgcccacgacgctgttgaagcggcgcaaggccatatccgtgaaggctacacctgggtggttgatatcgaccttgaaaaatttttcgatcgggtgaatcatgacaaacttatggcgcgcgtcgttcgcgttgtaaaagataaacgtgtgctgaaactgattcgtcgctaccttcagagcggtgtgatggttaatggtgtcgtgatggagacagaagagggcacgccccagggcggtcccctttcccccttgctggccaacattatgctggacgatcttgataaagaactcgagcggcgtggccatcgctttgttcgctatgcggatgattgtaatatctacgtccgtacggaacgtggcggcgaacgcgtgatgaattcggtgcgtggctttctggagaagaaactcaaattgaaggtgaacgaaaagaaatcggccgtggcacgggcaggccagcgtaagttcctgggttttagctacttctaccgcaagggcgaagtgctgatccgcgtagctgaacaagctcaacaacgcttgcgcgaaaaattacgcggcctgacccgtcgtacccggagcggccgtctcgaagaaattatccagcagctgaaagaatatatgcgcgggtggatgggctattttcgtttagcagataccccgagtgtattcgcggggttagatcagtggctgcggcgtcgtctgcgtcaattgctgtggaaacgctggaaacggggtactacgcgttggcgtgaactggtgtcgttaggtgttcctcgctctctggcgggacttggtgccactgggtcaagtccgtggcgcatggccgccaccccagtcgttccgatggctctgagtaccgcgttctgggacgcccagggtctgtgtagctttaccgagtattatcatcagttgcactggccgcgccgtacagcgggttgcggtccggcatgcccggtcgtg

SEQ ID NO: 160 - DNA, 1452 bp, synthetic construct
  source 1..1452: mol_type = other DNA
atgagcagcctgcgtaacgagcaaggccgccagaaactgtcagatcgcgaaaccggtgaaccgacacagcaggtcaaacctgaaggtgaagtgcagtcagcggagccttttccggcgcgcgatgatggcaaaagtgacgagagcgacggcctctctttatcgaaacccgtgtgggaagcagtgttcgcccgcgcgaatctgtttgcagcgctgaaacgcgtggaatcgaataaaggtgcagccggggtagatgggatgaccgttaaagagctgccggcataccttaaagcacattggttagaagttcgcgacgctttggaaagcggcaagtatcgcccgtccccggttcgtcgcgtggaaatccctaaaccggatggtggtgtgcgtcagctgggcattctgaccgtgctggaccgtctgattcagcaagccatcgctcaggttctgaccccaatgtttgaaatggcgttctcccccaactcgtatggcttccggccgggccgctcggctcatcaagctgtagaacgtagtcaggaatacattcgggaaggatacgactgggttgtcgatattgatctggaaaaattctttgatcgcgtaaaccatgatatgttgatggcgcgtgttgcccgggtcgtgaaagacaaacgtgtattaaaactgattcgtgcataccttgaaagcggcgttatgttaaacggagtggttatggatacggaagaaggtacccctcagggcggtccgttaagtccgctgctttcaaatatcatgctgaccgacctggatcgcgagcttgaggaacgcggccagaaatttgttcgttatgccgacgattgcaatctgtatgtcactccagcactggccggcggagcgcgcgagacggaacgtgcgggcgaacgtgtgctggagagcgtaaagcagtatttggagaagaagctgaaactcaaagtcaatcccaaaaagagtaaggtggagcgcgccactcgtgccaagtttctcggtttcagtttttggaaacgtaaaggagaagtttttattcgcttggcgaaacgtaccaaagaacgcttcgcggagaagatccgttaccttacgaaacgtacccggtcagggaaaatggaagatatcgtctccgaagtaaaccgctacactcgtgggtggatcgggtattttcgcctggcgaccacaccatccgtgtatcaagaaatggatgaatggattcgccggcgcttgcgtcaaattcagtggaaacgttggaaacgtggtcgtacgcgttaccgtgaactggtccgcctcggtgtgccgccaaaacgtgcagctttaggtgccgtcggcacgtctccgtggcgtatgtctcacagcccgatcattcacgaggctctctctaatgcgttttggcgcaacacgggcttggagtccatcacagaacggtataaccaattccgttatagccac

SEQ ID NO: 161 - DNA, 1398 bp, synthetic construct
  source 1..1398: mol_type = other DNA
atgaagtcaggtggtgaatggcgccagcagctgttgccgtttgaagcggaagcaccgaccggtggcgcgggccaaaactcagcagggccggcaggtgtcagccgtgctccatggcgccagccggatcctgcatcggctcgcccgacgctgctgcgtgaaatcgttcgcgaacgcgttcttgaggccgcttggaaacaagtgcgccgtaaccgtggcgcgccgggtattgacggaatgcgcgtaggcgattttgaagaatggattggcgtacacggtgatcaggtgcgtgccgagattctggcaggaacgtatgaaccgcagccagtacgtcgtgtggaaatccccaagcccggcgggggcgttcgtttgctgggtgtgccgacggtgttggaccgcgtaatccaacaggcccttgtcattgttctcacccctatcttagacccgacctttagtgagagcagctatggcttccggccgggtcgtagtgcacatggagcggtggcggcagctcgtcgccacattgcggatggttaccgctgggtagtcgaccttgatctgagcaagttcttcgaccgggtcaaccatgacgtgctggttgatcgtttatggaagcgcctgggcgacgggccgttactcagtttgattcgtcgctatcttaaagccggcgttctgatcgagggtgtggtggtcgagagtgttgaaggcactccccaagggggacctctctccccactgttatccaacgtcttactggatgagtgggatcgtgagctggaacgccgggggcatcgctttgtgcgctatgctgatgattgtaatatctacgttcgtagccgccgggcgggcgaacgtgtgctggcatcctgccgtgattttctggagcgtcgtttgcgcctgaaagtgaatgaagaaaaaagcgcggttgcccgtccgtgggcgcgccaatttttaggctactccgtgaccaacggcaaaaaaccgaagcagcgcctggcgaaacgtagcgtcgtccgtctgaaagaacgtgtgcgcgccattacctcacgttctcgggggatttcgctcgagcagatgttgcgcgaattgtcccggtatcttcgtgggtggtcaggctacttccgccggattgaaacaccttcggttttagaacagctggattcttggatccgtcgtcgtgtgcgctcgtttctgctgaaacaatggaaaccaggtcgcggacgtcgtcgtgcgatccagaaactgggtgtggatgacggctggcgtctgagtgcctctcgtaaaggtccatggcgcctgtctcgcggtaaagtaattagcgcggccctgccgaatgctactctggaacagcgtggcctcgtcaatcttaaacaggaatggaaacgcctcgccgaactgttc

SEQ ID NO: 162 - DNA, 1245 bp, synthetic construct
  source 1..1245: mol_type = other DNA
atgaccaccgaatgcacgatggaagcgatgttcaattggctgaacctcgaggaagcactggaagccgtcaagcgtaataaaggggcggccggcatcgatggaaaaagtatcgctgaaactgagcaacacattgaagaatactggacccaaattgaagcgaaacttatggcaggtcagtatattccgtctcaagtgaaaggcgtgaaaattccgaaaccgaatggggagaaacgcttattgggtattcctaccgttcaggaccgtgtgattcagcaagccatgaaccagcagctgagcaaagcctttgaccgcgagttttcgatcaacagctacggcttccggccctatatgtcggcacagcaggcggttaaacaggcgcaactgtacgttcaacaaggcaaacactgggtcgtcgatattgatatctccgccttctttgatgaagtcaatcacgacatcctgctccatcagctgtcacagaaagtaacggacaagcgggtgcaaggcttaattcgtaagtaccttaaaaccggtattatgattgagggtaagctggaacgccgtggaaaaggcatgccgcagggtagtccgttgtcgcccctgctggctaacatctacctggatcgcttagacaaagaattggagaaacgcggactgagcttctgtcgttatgcggatgatacatccctgtatgtgagctctgaacgtagtgccaagcgtgtcctggaatcgttgacccagtggattgaaaaacatttgaaactgaacgtgaaccaatcaaaaagtggcacgggtcgcccatgggaaagccagtttctggggtttcgtattggtaaagatggcgaaatcggtatcgctccaaaaagtattgaacgctataaagaaaaagttcgtaaactgtgggatgctcgtcagtccctgacgtcaaaacagttaattgagcagtggcaaaagtattccatcgggtggtggaattattttaagcttgcgactaagcgctggaccatccggtgttgggtaggttggacgcgccgtcatattcgcaagtgcttctggcagcgctggcataataaaaaaggtcggctgaacgcgctccgtcgcctgggcgttagcgagtatcttcagaaaacagcatcgtcctcacgtggcgcgtggcgtatcgcgtctagccctgctctgcataaagcattaagcaacgcaactcttcgccgttacggcctcgacgtgccgccgttatctgccgcc

SEQ ID NO: 163 - DNA, 1266 bp, synthetic construct
  source 1..1266: mol_type = other DNA
atgggcaaacagcggagcatgacgccacatcagccttctttactgatgctccgtattgttgagcgtaataatctgcagcgcgccctgaaacaggtgcaacgtaaaaaaggcgctccgggtgtggacggcatgacggttgaggaactgccggactacctgcgtgcccactggccacagttgcgtgagcaactggtgggtggtacctatcgtccgaagccggtgaaacgtgtgttgatcccgaaagctaatggtaaacaacgtaaacttgggatcccgaccgtggtcgatcggttcgtgcagcaagcgattgcgcaggtcttatcagagtattgggaaacgaagtttcatccggactcttacggcttccgcccccaacgcagtgcccatcaggcaatccgccgcgtgcaggcgtatacccgtgcagggtatcgcacggcggttgacctggatcttgaatcattttttgatgaggttaaccacgaccggctgatgcgtgctcttcatcgcacccaccccgacaccgatgttttgcagttagtaaaccgttaccttaaagcaccagtgtccacatgcgatggacgtctgtcttcggaaaaaggtgtgcctcagggcggtcctctgtccccgcttctggctaacattgtcctgaacgaaatggattgggaactcgaacgtcgccagttacgtttcgcgcgctacgccgatgattgtcagatcctggtaggctcccaccaggcgggtcagggtgtcatggcatcattgacccgctttattgaaaaaaccttgcgccttaaagtcaatcgtgaaaaatcggccgttgccgatgttcacgaacgcacatttctgggctttgtcctcacgcgccgtgatcaacgcatccgtgttagtgggaaagtactcgaaaaattaaaagcaaccgtgcgcactgtaactcgtcgcacccgtggacatagctttcgcaagattctggaagagctgcgccgctcgctgttggggtggaaagcatatttcgacgcaagcgaagtcctgagtcccctgaaagaactggataagtggattcggcgtaagctgcgttgctatctgtggaagcaatggggtcgtgcgggctatcgccgcctgcgtgaattgggcgtaagccgtcaactggcgtggaacacagctaaaagtgcgcatggcccatggcggattagccattcgccggccctctaccacgccctgccgacttcctacttccgtagcttaggactcccggagttagcggcgcgg

SEQ ID NO: 164 - DNA, 1368 bp, synthetic construct
  source 1..1368: mol_type = other DNA
atgtcgctgaaacatgctatgcaccagatgctcggccaaccgggccgtgccaatgtgggggaaggcgaaccgcagctggatgtggtaagcgatgaagcatcattagcgggtcatacccaggaagggagtggccaggaagacttgctgcaacaaatcctgctgcgtgaaaacctggtgaaggcatggaagcatgttaaagccaataaaggtagcgcgggcatcgatggactgacgattgagcagactaccgaatatctcaaaacccactggtcaaaaattcgtgaagagttgctgtctggccaataccgccctcaagcggtgcgttgcgtcgaaattccgaaaccaggttccggtacccgtgaactgggtatcccgactgtggttgatcgtctcattcagcaggcgatgttacaggtgctgcagcccttaatcgacccgacattcagtaacttttcctatggctttcgcccggctcgctctgcacataacgcggttctgaaagccaaacgctacgtcgaggaaggttatcagatcgtcgtggatattgaccttgagaagttctttgaccgcattaaccacgatatcctgattgatcgcctgtcgaagaaaattccggataaaagtgtgctcggcctgattcgccgttaccttcaggcgggcacgatggtgaatggtgtagttatggaacgcgaagaaggcacgccacagggcggtccattaagcgcactgttagctaatgtcttgctggatgaagtcgacaaagccctggagcgccgcggtcataagtttgcacgttatgcggacgattgtaatgtttatgtacatagccaacgcgctggagaacgcgttcttcagtcattgcgctgcatctacgccaaacttcacctgaaagtaaacgaagctaaaactaccgtgggaacagtgttcgggcgtaagttcctgggctattgcttgcgtcgctggtcgggtgatacggtgaaaattgcggtggccaccaaagcattagagacattcaaacagcgcattcgtctgatcacctgtcgtgtaggcggtcgtagcatgattcaagttgccgagcgtctccgcgcgtatctgccggggtggaaaagctattttcgtttggcgcagacgcccactacctttaaagatcttgactcctggctgcggcaccgtctccgtgccatccaactgaaacactggcgtcgtggatctacgacctaccgggaattacggaaactgggggctacccatgagatggcgagtttgatggccgggggtgcaggccattggtggcggcattccaagtttaaccttaacatggtcctgaccgttgcgtactttaataacctgggcgtcccttggctgacg

SEQ ID NO: 165 - DNA, 1374 bp, synthetic construct
  source 1..1374: mol_type = other DNA
atgaaaaatggcgaggaaccgtccccggactctactcgtcgcctttcacgtccgggtcaagccgctgccgccccgtccgagaaaccatccccgagtctgtttccagaacgcatgatggaagtcatcgtggactctgcaaacatgcagcgtgcttgggatcaagtccgcggaaaccgtggggcgcccggacccgatggtgttacgctgacgcagtttcctgaatggtttcgcccgcagtgggccgtaattcgccagcagctgctcgatcgcacctacgagccgtcaccagtgcgtcgcaaaacaattgacaaaccggatggtggccagcgtcagttggggattccgaacgttctggatcgtctcattcagcaggcgattcagcaagtgctcaccccggtgtttgacccgggattttcggatagctcgcacgggtttcgtccaaatcgctcggcccatggcgcggctaaacaggtggaacgcacgattcgtcgcggtcgtcgcttcgtggtggacatggatctgtctaagttctttgatcgtgttcaacacgatgtgttaatgtcgcgcgttgctcgtaaagtgcgggatcggcgcttactgaaactgattggtcgctaccttcgtgcaggtgttatggtagaaggcgtcttgcagagcagccctgaaggtacccctcagggtggccccttatcaccattgctggcgaacatcctgctggacgacatggataaagagctggagcgtcgtggcttgccgtttgtccgttatgccgatgattttgtgattttcaccaaaacacggcgtgcggcggaacgcgttttcaacggtgtaaaccgctatcttaccaaggttctgcgtttagtggtcaatcttgagaaatcccggatccttccggcggacggggtagaatttctgggcttcgtctttcggggcgtcacaggtaccatccacgtgagcgaaaaaagcgttcaaaagtgcaaacgctggatccgtgaactgaccggccgctctcgcggcatcagtatgacccaacggttgggggaactgcgtcgctatttgcaaggctgggcaggctacttcgcactggcgaaacagatgcgtctgttcgaaaatcttgaccagtggatccgtcggcgtctgcgcatgtgcctgtggaaatgttggcgttttgttcggacgcgtgtacaaaacctcttagcactgggtgtacctcgccgccaggcgttccgtcatgctaaaagtcgtcagggcccgtggcatatggcgaagactattgccagcggagtcggtatgacgaatgcatggctgcatgatcaaggcctcgtgagcttaaagagtctgtgggttaaacgtgcacctctgcgccgtactgcc

SEQ ID NO: 166 - DNA, 1266 bp, synthetic construct
  source 1..1266: mol_type = other DNA
atgaaaaaatggtattcgctgatcgataaggtgtaccgcctggataaccttaaacgggcttatcgcgcggttcgtgcaaataaaggagcgccgggtgtggacggtgaaaccgtcgaagcgtttggtcagaacctcgaggagcgcttacatcagttacatcatgaactgaaaacgggtacgtacgaacctcaaccggtgctccgggtcgaaattccgaaagcagacggcagcaaactgccgctcggcattccaacagtgaaagaccgcgttgtgcagcaggccttattgaacattatgcagcctatttttgaaccggattttcacccgtcgtcctatggctatcgcccgggtcgttcatgtcatcaggctgtggccaaaagtgagcgtttcatgaacaagtatgggttagagtatgtagtagatatggacctttctaagtgcttcgaccgcctggaccatgaactcattctggaaggcgtaaaccgtaaggtgtctgatggatctgttttgcgcctgattaaaaaatttttaaccgccggtgtcatgaaaaatggcgcatgggaagaaactgatattggctcaccccagggcggggtgttcagcccactgatcgctaacatctacctggatcgctttgatcaagatatgaaacgtcgcggtattcgcatcgtacgttacgcagacgatattctcatctttgcacgtactcaccgtgaggcccgtaagtatcagaaactggcgacggaaattttggaaagcgagctgaaactggttgttaacaaggaaaaaacccacctgacatccgtcaaaaaaggcgtaacctatcttggtttcatcatcaaaagtaagttcgtcagtatccacccaaaaaaaattaaaagtttcaaagatcgtatccgccaactgaccccgcgtaatcatggaattaacgttgaagaaatggttaaacgcctgaacccggttctgcgcgggtgggccaattattttcgtgtggcgaattgcaagatgcttttcctgcagctgatggaatggattcgtcgtcgcctgcgtatgaaacaaatgaaagaatggaaaagctggaaaccactgcacaaagcgttacggcgccgcggttacaaaggcgagtttcggaagatttcagtgacccgttggtgtaattcggctagccctttggtcaatatggccttgcccaattcctggtttaatgaaatcgggctgattaaccttgcgagctacaacgtgggcatcttgcaccatttttgggag

SEQ ID NO: 167 - DNA, 1284 bp, synthetic construct
  source 1..1284: mol_type = other DNA
atgggcgacactatgaccaaacgcaagcatcacagtctctatggccagatcctgcaacgcttagataccgcattcgcgaaagtgaaagcgaatcgcggcgcggcggggattgatggagagtccattgccgagttcgagcaagatcttgaagctaatcttgcacaactgaaacgcgatcttaaagaaaaaacgtacgcgccacaacccgtccgtcgtgtgtatattccaaaagccagcggtgggcagcgtccgttaggaatcccaactgttcgtgatcgcgtggtacagcaggccctgcgtttagtgctggaaccggttttcgaaccgctgttttgcgacagttcttacggtttccgtccgggtcgctctgcccatcaggcgctggaccgtgtgagcggccacctgcgtgaaggttataagtgggtggtcgattgtgatttgaaatcgtatttcgatacaatccctcaggaagcattgatcgatcgtgtggcagaagaagtcgcggatggaacggtcctgaaactcatccggtcgtttctccaggccggggttatgagtgaaggccagcttcagcgcaccatcgctggcacgcctcaaggtggcgtaatcagcccactgctcgcaaatatctatctgcatggttttgaccagctgatggaagatcgcggcctgcgcctgacgcgttacgcggacgattttgttattttatgccgcacccaacgcgccgctgaacgggtaatggggaatgtccagtcatacttggaaggccagctcggtctgacggttaaccgcgaaaaatccaaagtcgttcacctttccgagggctttgttttcctgggctatgagtttggaacctggggtcgtcgtccggggcctaaagccattctgcggttcaagcaacgcattcgtgaactgacccgtcggaaccagactattcccgtagataagatggtgcgtgagcaactgaacccgtatctgcaaggctgggcaggttactttggctatggccaggtccgtcagcgttttctggactacgataagtggattcgtcggcgccttcgtatggtccagctgcgctcgtggcgccatatgaaaggtttgcatcgtgctatgcgtcagaaaggttggaaagggccgctgccggcggtttatgtgaacatgcgtcgttggcgctcttcagttcacagcttagtgaactacgctttgggcccggactggattcgcggtctgggtttggtgagcttagtggactttcatcgtccgaccatggtaacagtgacccgc

SEQ ID NO: 168 - DNA, 1170 bp, synthetic construct
  source 1..1170: mol_type = other DNA
atggggcaaatgctcgaggccatcgcagacccggcgaacctggccgcagcgtgggcaaaagtccgggccaacgccggtgccgctggtgtcgatggtcagtccattgcggcgttcgatgcggactcggaacatcagttagttcgtctgcgccggcgcttactgtctgcagagcgctatgtcccgccgcctgtcttacgtgttgaaatcccaaagccggatggacgtatgcgccccctgggcattccgaccgtggctgatcgcgtggtgcaacaagcaacgcgccaggtgattgaaccacactttgaagcggaatttctgccgtgctcgttcggctatcggcctgggcgctccgcacagcgtgcagctgtttggtgggtaaaagaagcgatccgccgcggtgatcgctgggtggctgaatttgatgtggaaggattctttgatcaccttagccatgcacgtctcctgcgccaggtcgccaaaaaagtagacgaccccgaggtgattgggctggtgcggcgttggttacgcgcgggcgtctttagcgccgaaggcctggttcccagcgtggcgggcaccccacagggtggtgttatttcaccgttgctggctaatatctaccttcatcgtttggacgtgaaagtgcgtgcggcgggtttccggctgatccgttacgccgatgatttcgttattctggctgaccggcggtggaaagtaaaagcggccgaccgtctggttcgcagtatcctgtccgatatgggactgtcagtatctgaagccaaaagtggtgtcgtccgtgtacgcgacggcttcgagttcctggggtttacaatccatggccgctttttgcgtccgcgtccacgtgcgttggctagttttaaagatcgcgttcgtagccgtacccgtcgtcaggcgcctgtgtcgatgagccagatgattgatcagcttaacccgttactgcgcggctggggcacgtactatgcgattggggacgtagtttcactctttgaggaccttgataagtggattcgtatgcgcctgcgtagcaaagcccgtaaacgcttcaaaagtaaaggcggtcctgatggccaaaagtggccgaataaagcatttgatgatttgggcctggtgcgcctcgaacaccttgcccgcactggtaagctgtctccggtt

SEQ ID NO: 169 - DNA, 1158 bp, synthetic construct
  source 1..1158: mol_type = other DNA
atgaaaaaacgcaagtggtactcactggtggacaaaatttggaaattcagcaacctcgaggcagccttttctaaggtgaaagagaaccgcggcgccgcaggtatcgatcgtgtttcgattggtcagttcgaacgccagaagcagcaaaatcttctggaaatccagcgtctgctgcgcagcaaacgttatgaggctattcctgttcgtcgtgttgaaattccaaaaagtgatggccgttaccgtcctctgggtattccgaccgtccgtgaccgtgtcgtgcaacaagctacttttgcggtgatgtcgccgatttttgaaacgaagttcctggactgtagctatggttttcgtaaaggccgcaatacccatcaggctattgcaaaaatggaacagtatcgtaacgaaggctgcgaatgggttgtggaagcagacatcgaatcctttttcgatactgttaaccatgaattattgatcgatcaggtcgctgaagagattagcgatgggagtgtcctgaaactgatccgtagttggctgacggcgggcgcgtttaaaggcaccgaagtgattgagacaagcgtagggacgccgcaaggtggagtaatctcaccactgttagccaatatctatctgcatccgtttgatgtccagatgacagcattgggttttaaacttgttcgctacgcggatgactttgtgattatgtgccgctctgaagatgaagcggaacgtgcgatggaagccgccacccgtattctctcgggcatcaaacttcgggtgaaagcggcgaaaacgcgcatcgttcagttgagcaaggatgacggcatcgaattcctcggttttaccatcttcaaagagcacaaagtaccccgcactcgcgcagtagaaaatttcaaaagtcggattcgcctgattacccgtcgccaacgtccggctacccttcaggaaattattaaagagttaaacccggtggtgcgcgggtggggaaactattttaaaatcgccaacgtcaattggctctacaaaggcctggattcctggatgcggatgcgtctgcggtcctttttagaaaaaaagaagtcctacgaggcgaacaaacgcctggagaataaacacttctcggaagccggtttgaccacgctgtcatctctgattggatat

SEQ ID NO: 170 - DNA, 1380 bp, synthetic construct
  source 1..1380: mol_type = other DNA
atggcatcccccgccaccgaatgcccggcgggccattcagcggtggcgacaaaaagtagcgcgggtcaccgtgttggtttttttgctgcacggcgcgctgctaagagtcagggccgccgccagggtcaggatgggcagcaacgcagtcccaaaccgtcatctgggaatgcccgcgcggaaggcccgcgccgtgtcaaacggaaagtgagctctctgatcgaccaggtgtaccggtgggaaaatctttatcgggcatggcgccgtatccgtcgcaacaaaggtgtgcacggcctggaccgcgttactatccgtaattttgaggcggattgggaaaaacaccttcgggagattcaacgtatgttaatggaacagcgttatgtcccaacccctgtccgccgcgtgtacattccgaaacccgccgatccgaccaaacgtcgtccgttgggtattccgatcgtggcggaccggattgtacaacaggcaatctttcaggttgtggatccactgtttgactcaactatgtctgatcggtcgttcggctatcgtaaagggcgtaaagcccacgatgccgtcgccgctctcatttccgatgcgaagcaaggctaccgctttgtcttggatgccgatattgccagcttcttcgatgaaattgaccatgatgtggtcatgagctgcgtgcgcgctcgtattgccgacggacgcgttctggacctgtttgaggcgtttttgaaagcaggtgtgtccgaggatggcgaagtttcagtaccggataaaggagtcccacaaggtggagtaatcagcccgtggctgtcgaatctggttctggatcatctggacaaggcaatcgaaaaggaaggctggcgccatgcgcgttatgccgacgatttcgtggttctgtgccgtagccgcgaagaggcacagcgtgcgctgaccgtagttaaagaagtcttagaaacgcttaaacttagcctgcatgaaacgaagacccgcctcacagattgtgagcagggcttcgaatttctggggttccattttcgccactaccgtctgggtattcgtgaatcgtctatcgaacgtttcaaagatcgtgtacgcgcgttaacccggcgctggcaaggtcgtaacgtggacgcggtgttggcagatcttaacccggtcttacgtggctgggcgcgttatttcggcgtggccgaggttagtctgacgtttcgctacctggatagttggattcgcatgcgcctgcgtggttttaagtacaaacgtcgttgttatcatgacaactggcgcttgccatcgaaacgtctgaaacgttggggcctgctcagcctgcagcagtgtcgccctcagttacgtctctcctatgctcgtgcagttgggcct

SEQ ID NO: 171 - DNA, 1353 bp, synthetic construct
  source 1..1353: mol_type = other DNA
atgcaggaatctggtagtgctaaaactatgaccaatgatgaaacgactcgcccaaccgccgttgccggtctggatcaacccaaacaggcgggtaatatccgtgaccggtggggctggattgagcatagtgtgtggacggaacgtatgctgacccgcctcgaggcttctgagccgactacggtctggtatggcctgtgggataaagtacatagcgaacgtaacttggaagcggcgttttgggcagtttggcgcaaccgtggcgcaccgggcgtcgatgggcagaccgtccgtcagtttgaagcacaagaacaagctcagctggcgaaacttcgtgaagaattgcgtagcaaacgttaccatcgtcaaccagcccgtcggacgtggatcgcgaagcctggcacgctggagaagcgcccgctcggcattccggcagtgcgggaccgtactgtggaagcagctctgaaacaggtgttagaaccaatcttcgaacaggacttcgcggagcattcctatggctttcgcccgggacgtggttgtcgtgaagccgttaaacgtgtggaagcgctgttaggccaaggtcgggtgtggtgtgtagaccttgacttcaaaagttactttgatacaatccctcacgagcgcctgctgggcctggtacaacagcgtgttgtggatggttccgtgctggcactgttagctcaggggcttaaagccggagtactggaaaccctgaaaggctggcaacccacggaagttgggaccccgcagggtgcggtgatcagcccgctcttagcgaatctgtacctgaacccattggaccacgccatggcggagcgtggttgggaaatggtccgctatgccgatgatcttgttgtactctgccagtcccgcgaagaagccgaacaggcattggcatatcttcgccagtggagcggtgaggcgggtctgtcggttcaccctaccaaaacccgtattgtcaatgcccactcagaaggtttcgattttctcgggtggcatttccgcggcgggaagaaatggccgcgtaaaaagagcttgcagaaactgcgcgataaacttcggccgctgacccggcgtacaaacggtcgttctttagaagaaattattacaaagaccaaccgcattctgcgcggttggcacggctattttcgtgagtcgcatcctacgggcctgagcgggccggacggatgggtgcgtcgccgtttacgcgcgatgctgcgcaaacgtgaaaaacgcccgggctacggtctgagtgaggctgattcacgccgctggcccaatcgctggtttggagtccagggcttgttttcgctggagcatggatcatgcgcctatggc

SEQ ID NO: 172 - DNA, 1254 bp, synthetic construct
  source 1..1254: mol_type = other DNA
atgaaggcagaaggtacaggccagaaggtacactctctgatcgataaagtctaccaccgtatcaaccttgatatggcatgggaatctgtacgcgcgaatggcgggagtgggggaattgataagattgccattcccgcgtttcaagctgtggccgaggtagagttggaacgcttacacgaagaattaaaacagggtacttatcggccgatgccggttcggcggatcctgattccgaaaaaaggcaaacccggggaaaaacgccctctgggcattccgacgattcgtgatcgtgtgtgccaacaagcccttaaaaaccgcctcgaaccgattttcgagcctctcttttcggaatgcagcttcggctaccgcccgggtcgttcaactcatcaggccatgcgtaaaatgtatcgtgaaatcctggatggctatgaatggattgtggatgctgatctccgcgacttctttggtaccgttcatcatgaacctctgattgaccgcattgcagagcaagttagcgatggtcgtattctgaaactggtccgtcagatgctggaagctggttacatggaagacggtaaaaaatatgcgacgccgagcggcaccccacaaggcagcgttgtgagcccactgttttctaacatctatctgaaccgttttgaccatgagatgacaagtaaaggttaccgcttgacgcgcttcgcggacgattgggttgtgctttgtaaaacccgtgccgaggcagcgcgtgcgatccgggacgcacgtacaatcttagaatccttgggtctgacgttacatccagagaaaacgaaaattacccacatcaagtggggctttgagtttctggggtataaacttaaacgcggcaaaggtctgtccctgccccaggaaaaggttaagaagcagccaaaaaccaacatctatgcgttccctaaagcgaaaagtgtccagtcgtttatggataccattcgtacccgtacccaccgccgtattccgttaactgtctttcagcttattgactccattaatccggtgatccgcggatggggcaattatttccgtaaagctcatgtccgcaaactgttcaaccgtttgcagcgttggatcgtgcggcgcatctggtcgcatcgctataaacgttggcgcaatgccggatggaagaaactgccggaatcaatcttgtacagcaaatacaatctggtgaatctcctgtcactgattccggatctcaacctgcgtaccgccccgaaaggc

SEQ ID NO: 173 - DNA, 1293 bp, synthetic construct
  source 1..1293: mol_type = other DNA
atggaagtgactcgtcgggatcgtgtgaaagctggtttactggagaacatcctttcgcgcgataatatgttagctgcgttgaaacgcgttaaggcaaataagggttcgcatggggtggatgggatgaaagtagacgaactgccggcgtatcttaaagccgcttggcagaccattcgtcagagtctgttagatggtacctatgtacctcagccagtgcgccgtgtcgagatgccaaaacccgatggtggcgtccgtttacttgggatcccgacggtgctggatcgtttaatccagcaagccatcgcccaaattttgtcggatatttttgaacccggttttagctgccattcatatggttttcgtccgggcaaaggagcgcatgatgccattcgcgcggcgcgtgattatatccgtgcaggctacgactacgttgtggatattgacctcgagaagttctttgatcgcgttaaccacgacaaactgatggcgcgcgtagcgcgtaaagtagatgataaacgcgttctgaaactgatccgtcgttatctgaccagcggcgtgctggtcaatggagtgcgcgttgcctcagaagaaggcaccccgcagggcggccctttgtccccgctgttggcaaacattctgctggatgacctggataaagaactcgaacggcgtggtctgaaattttgtcgctatgcagacgactgtaacatctatgttaagagtaaacgggcgggcgagcgtgttatggcatcgattggtcgcttcatccgtgaacggctgtcactgaaaattaacgagaacaagagtgctgtagatcggccggcggctcgcaagtttctgggcttctctttttaccgtaagaaagacgacgtcggaatccgcatccacccgaaaagcgtgaaacgcttcaaggaaaaaattcgttccattacaaaccgtaattggagtatgagcatggacgaacgttttcgccggctgcacagcctgtgcgcgggctggatccgctacttcggcctcgcggatgcaaaaacacatatgcgtgaactggacgaatgggtccgtcgtcggattcgcgcctgcttctggaaacaatggaaacgcattaaaacgcgccatgataatctcgttaaactgggtgtggacagcatgaaagcctgggaatgggccaatacgcgcaaaaaatactggcgcattgccgggtcttgggtgttggcaaccactttaacgaatcaggtcctcgaagatatgggttttcgcaacctttccaaactttactccgagatgacctattct

SEQ ID NO: 174 - DNA, 837 bp, synthetic construct
  source 1..837: mol_type = other DNA
atggctagcgcatggagtcatcctcaattcgaaaaatccggaatgccctacaattacgacttatgttttaagactccgcaaaaccggtggatattcgtaccaacatcagagtgccgcgataatggatacgaatacgttaaacttatacgacgaaaatggaccctgccgaacttttactatcaccttaaggctggcggacacatagctgcacttaagctgcacgagggtaataactactttgccaagattgacattaagtcattctttccctcgatatctaaggcgaaggtcatccgggcattaaaggatataggcatcaattacaagctggcggagttaatcgcctcttggtcaaccgttaagtcaaaggagaacagtactaaatatatagtgccatacggatttgtccaatcgcagataattgcttcattatgccttgataagagcgcgataggttccttcataaagaacaagctgccgaccgacgtgaaggtttcagtctatgtcgacgatatcattctgtcctcgaacaaccctagtgcgctccaagacatctacaatcaaattatcgctacgttcgacaaaacaggtttcaccgtaaatacagagaagtcacacgaagttttagaccaaacgacgacttttaacatcgttatgaatgctgaagacatgcagataaccgaggaccgtttcacagactttgaatctgccatcactccccttaacattaaacgctcagaggccatcattaactacgtgagttcagtttgctctatccaatctgagacgctgaaggagcaactcaaaagcatgatagacaactcgaagtgtgcatga

SEQ ID NO: 175 - DNA, 933 bp, synthetic construct
  source 1..933: mol_type = other DNA
atggctagcgcatggagtcatcctcaattcgaaaaatccggaatgcaatggcttcggtattacgaattaagccccgggtcacagaaatacatctacatacctactgatgaaagtcgattaatcggaagtgaaattattaatgtattgaagtaccggtggaagaagccggagtacttctatcacttccggcaaggtgggcacctgagtgctatcaaggtgcatttctacgacgaggagccgtgtcaattctctgttttcgatctttcaggctattatcgccagataacccggtcaaagcttgtccgagttttgaagaaatatgttggctacgagcaggcactggattgggctcaaaagagcaccgtgctccaaaatggggatctgggccggagtatacctttagggtttgttcaatcaggtttcttggcaagtttagtcttagataacagctgtttaggcaagaccctgcgagaaattaataagactcctaatatccgtatttccgtcttcgtggacgatatcgttatctcctcgcaagaccatgagctgttaagtttctactcacagaagataaaagaggcgagcaagaagtcaaacctgacgctgcaacaccgtaagacgttttgtaacatagattcgatcaacatctttaatctgtcatacaaatcaggtagtgagattgatttctgtgccgatcgggttaacaacttcaaggaaattctcgtaaagaattgcgatcgcaaattcgtcgtatttggggtcatcatgtacatgcttaaagtaaacgcaaagagaactttatcgattctggactctatagtgcaagagaaggggatttctaaaactggtatcctgggcaagttttactacgaacacaagataaaggagaatcaaaatataatcgagacgttacgcaaggtgtgttttcaatga

SEQ ID NO: 176 - DNA, 813 bp, synthetic construct
  source 1..813: mol_type = other DNA
atggctagcgcatggagtcatcctcaattcgaaaaatccggaatgagcaattacacccctaagtggattcatcgtatcacgttagaaaacgggaaatggatctttgtcccatctcaatccagccgactgtctggtaaagctatagttaagaaggtaaaacttgagtgggcgccccctaagtacttctaccacttaagacggggtggccacatagcggcgttaaatgcgcacctcgagaacaagtactttagtcgcctggacatcaagaacttcttcggaagtattactgcaagtcgaatcacacgtacccttaaaccttacttcggttataacttatcccgggacatagcaaagcaatcgacagttcgtatcccgggcttgttagagagaaaactcatgctgccgttcggcttcatacaaagcgcgatcttggctagtatttgtttggacaagtcgtcattgggcatatttctcaaacgcatcaaacgggacaagtcgctgtccctgtcagtgtacatggacgatattctgatctcttcgaatgatcaacaacgcttgatagaagtaacggcagaattgaagtcctatttcagcaagagccactgggtgagcaatactggcaaagaggttatagccgccgatagtatgacagcgtttaacatcgatatgttgcaatatgagatgcgtgttagcgaagagaagatgaagcaattcgccttcaacttctctgaaacagagaacatcaacaagaagaagggcatctactcatacgtgaagactgtgaatgacggtcaattgatagacttagtttga

SEQ ID NO: 177 - DNA, 798 bp, synthetic construct
  source 1..798: mol_type = other DNA
atggctagcgcatggagtcatcctcaattcgaaaaatccggaatgacccaaaagtggacacaccgctaccaacttaagcctggccgatgggtattcgcacccacggatgaggcaaagaaatgtggcgcccatatcaagcggagcgtcgcgagtagatggaaggctccgaacttttattatcacttgcgaaacggtggccacgtagctgcggttcgaagtcacgagttatcacgtttcttcttccgagccgaccttgatgacttcttcggacgtgtcaaccggagtcgcgtaacccggtgcctgaagccatggttttcctatgcggaagcgcgggagatggccagtgagtctgtagtcaagcgccccggggagacagccttcgtacttccctacggctttgtacagtcccccatcctggcgtcgcttgcgctggacaaatctaaattagggtcgttgcttcgatctttagacggtggcagagacttcactgtttcggtatacgtggacgacataattatctcaggcgacgacgaagctcagttgaaggaagtggcatcacgcctcgagcgggtagcgagcgaggctctgttccccctcagctctggtaagacccagggacctgcctctggtgttaccgtctttaacattgaactcagtcaccgtatgttacggataacagacgatcggttggcgtcactccgtctggactaccaagcaactgcgtctgaacactgtaaagccggaatcgtgtcgtatgtgtactcagtgaaccctgatcaagtggcccaggtcacctga

SEQ ID NO: 178 - DNA, 738 bp, synthetic construct
  source 1..738: mol_type = other DNA
atggctagcgcatggagtcatcctcaattcgaaaaatccggaatgcaatggagttcatattatgagttaacacccggcagtaagaaatacatttacattcccactgagcaatcacgtgagctgggtaagctgataatcgaaaccattagaaagcgatggacgccgccggcatacttcttccatctgcggaagggcggtcacttggcagcgatcaagcaccatatagacaaatcttgcaaaccacgtaagtttagtgtattcgacatatccgggtacttcggccaagtcaccgaaaataagttacggcgggtgctgaagaacttcgtatcattcaaggaagctagtcagtgggcttatgattctacagtcagaaagccttcggaagaccgacgtaccttgccttacggcttcttgcaaagcggagatctggcgagtttagttctggaccgaagttacttaggctgcgagtttcggaagatccaccaaaacccgaacataaagctttctgtctttgtggacgatatcattgcaagctcaagcgacccaattcttttagaagaggcctcgaacagcataattaatgcagcaaagttgtcaaatttcaagttcaatcaggacaagattcgttgcaatgtggatgaaattgagattttcaacatccactgctcccaagatttcggtttatcattcagccaagagaaattaaagaagaactcgaccaactcgaagaaactgtga

SEQ ID NO: 179 - DNA, 924 bp, synthetic construct
  source 1..924: mol_type = other DNA
atggctagcgcatggagtcatcctcaattcgaaaaatccggaatgctcattgacaagttttctaaggaaatcgggctcccgcggcctagtgtccaaaagatagccgcaagcgctaactacttatacaagcattacaccataccaaagcgttcaggtggagaacgcgacatctaccatcctacaccgagactgaagttagttcaacgctggattacccgccacgttatccgcgatcttcccgtgagtgacgcggcaatggcataccggaagggcaagagtatcactgataacgcgagattacatgctggaaagcgcttcttgctcaagatggacttcacggatttcttcccgtctattaaggcgcgcgacttacaacctattctgacgagccgtggttatgacccagaggatgttaacttcatactcacaatttgttttaagtcaggctcccttactatcggtgctccctcttcacccgctgtcagtaacattgttatgttcgccttggaccaggagtttaagggtatcgcggaccggcgcaagctgacctactcacgctacgccgacgacttgacatttgcgggaaacgtccgaggaaacttaatcgaagcgaagaaagacgttgaacggttgataggaacgtgggcgtctcctaacttaacacttaatcaacgtaagaccgttttggtgtcgtcggctcatagacaaaaggtaacagggattaccttaaccacggacggcgagatttccatcggtagagagaagaagagagaattgcgtgcaattgtgcaccgtagtacctaccagaaactggaaccagaggtcgaagcgtacgtacaaggttggctggcttacgctaactccattgagccgaagttcgtagactcgttgagaaagaagttcgatacataccttgacttttga

SEQ ID NO: 180 - DNA, 798 bp, synthetic construct
  source 1..798: mol_type = other DNA
atggctagcgcatggagtcatcctcaattcgaaaaatccggaatgcccatcaatttcaagtttgcatacgaatgtaaaggcaagagaatcttcgtgccaaatgacgagtgcgttagacgtggtgaggcactgattaaatattgttctcaggcggttgactttccaagctacttctaccactacagagctggtgggcacgtagccgcattgcaccgtcatttggagcaccgtttcttcttccgaatcgacatcgagaacttcttttactccattagccgcaaccgagtgagcgcagtactgcatcatataggtttccgtaaggcgcgcccatacgcggagtggtcttgcgtgaagaatccttttggggcaccggcttactctttaccgatcggcttcgtgcaatctccaatgcttgcatcattagccattctgcgcagcccggtggcagccgccatagagcgcgccgccgcagcaggtgccttcgtgagtgtatattttgacgacttcatcggctccgctgttgaccgggaacctttggagaaagcgtttcaggatatactgcactcttgtcaagaagctaatctcatatcaaatcagctcaaacttgcaaagccgtctgagcacatcttggcttttaactgcgatctctctcacggtatcgccgaggtcgcagaggctcgcgtggcaaagttcttcaaggcacctcgtagtcaatgggcggaagcggcgttccgtgagtactgcaaccgcgtggcgagaaacaatcataagtccgaaggcagacggttcctgcgttga

SEQ ID NO: 181 - DNA, 792 bp, synthetic construct
  source 1..792: mol_type = other DNA
atgccctacaattacgacttatgttttaagactccgcaaaaccggtggatattcgtaccaacatcagagtgccgcgataatggatacgaatacgttaaacttatacgacgaaaatggaccctgccgaacttttactatcaccttaaggctggcggacacatagctgcacttaagctgcacgagggtaataactactttgccaagattgacattaagtcattctttccctcgatatctaaggcgaaggtcatccgggcattaaaggatataggcatcaattacaagctggcggagttaatcgcctcttggtcaaccgttaagtcaaaggagaacagtactaaatatatagtgccatacggatttgtccaatcgcagataattgcttcattatgccttgataagagcgcgataggttccttcataaagaacaagctgccgaccgacgtgaaggtttcagtctatgtcgacgatatcattctgtcctcgaacaaccctagtgcgctccaagacatctacaatcaaattatcgctacgttcgacaaaacaggtttcaccgtaaatacagagaagtcacacgaagttttagaccaaacgacgacttttaacatcgttatgaatgctgaagacatgcagataaccgaggaccgtttcacagactttgaatctgccatcactccccttaacattaaacgctcagaggccatcattaactacgtgagttcagtttgctctatccaatctgagacgctgaaggagcaactcaaaagcatgatagacaactcgaagtgtgca

SEQ ID NO: 182 - DNA, 888 bp, synthetic construct
  source 1..888: mol_type = other DNA
atgcaatggcttcggtattacgaattaagccccgggtcacagaaatacatctacatacctactgatgaaagtcgattaatcggaagtgaaattattaatgtattgaagtaccggtggaagaagccggagtacttctatcacttccggcaaggtgggcacctgagtgctatcaaggtgcatttctacgacgaggagccgtgtcaattctctgttttcgatctttcaggctattatcgccagataacccggtcaaagcttgtccgagttttgaagaaatatgttggctacgagcaggcactggattgggctcaaaagagcaccgtgctccaaaatggggatctgggccggagtatacctttagggtttgttcaatcaggtttcttggcaagtttagtcttagataacagctgtttaggcaagaccctgcgagaaattaataagactcctaatatccgtatttccgtcttcgtggacgatatcgttatctcctcgcaagaccatgagctgttaagtttctactcacagaagataaaagaggcgagcaagaagtcaaacctgacgctgcaacaccgtaagacgttttgtaacatagattcgatcaacatctttaatctgtcatacaaatcaggtagtgagattgatttctgtgccgatcgggttaacaacttcaaggaaattctcgtaaagaattgcgatcgcaaattcgtcgtatttggggtcatcatgtacatgcttaaagtaaacgcaaagagaactttatcgattctggactctatagtgcaagagaaggggatttctaaaactggtatcctgggcaagttttactacgaacacaagataaaggagaatcaaaatataatcgagacgttacgcaaggtgtgttttcaa

SEQ ID NO: 183 - DNA, 768 bp, synthetic construct
  source 1..768: mol_type = other DNA
atgagcaattacacccctaagtggattcatcgtatcacgttagaaaacgggaaatggatctttgtcccatctcaatccagccgactgtctggtaaagctatagttaagaaggtaaaacttgagtgggcgccccctaagtacttctaccacttaagacggggtggccacatagcggcgttaaatgcgcacctcgagaacaagtactttagtcgcctggacatcaagaacttcttcggaagtattactgcaagtcgaatcacacgtacccttaaaccttacttcggttataacttatcccgggacatagcaaagcaatcgacagttcgtatcccgggcttgttagagagaaaactcatgctgccgttcggcttcatacaaagcgcgatcttggctagtatttgtttggacaagtcgtcattgggcatatttctcaaacgcatcaaacgggacaagtcgctgtccctgtcagtgtacatggacgatattctgatctcttcgaatgatcaacaacgcttgatagaagtaacggcagaattgaagtcctatttcagcaagagccactgggtgagcaatactggcaaagaggttatagccgccgatagtatgacagcgtttaacatcgatatgttgcaatatgagatgcgtgttagcgaagagaagatgaagcaattcgccttcaacttctctgaaacagagaacatcaacaagaagaagggcatctactcatacgtgaagactgtgaatgacggtcaattgatagacttagtt

SEQ ID NO: 184 - DNA, 753 bp, synthetic construct
  source 1..753: mol_type = other DNA
atgacccaaaagtggacacaccgctaccaacttaagcctggccgatgggtattcgcacccacggatgaggcaaagaaatgtggcgcccatatcaagcggagcgtcgcgagtagatggaaggctccgaacttttattatcacttgcgaaacggtggccacgtagctgcggttcgaagtcacgagttatcacgtttcttcttccgagccgaccttgatgacttcttcggacgtgtcaaccggagtcgcgtaacccggtgcctgaagccatggttttcctatgcggaagcgcgggagatggccagtgagtctgtagtcaagcgccccggggagacagccttcgtacttccctacggctttgtacagtcccccatcctggcgtcgcttgcgctggacaaatctaaattagggtcgttgcttcgatctttagacggtggcagagacttcactgtttcggtatacgtggacgacataattatctcaggcgacgacgaagctcagttgaaggaagtggcatcacgcctcgagcgggtagcgagcgaggctctgttccccctcagctctggtaagacccagggacctgcctctggtgttaccgtctttaacattgaactcagtcaccgtatgttacggataacagacgatcggttggcgtcactccgtctggactaccaagcaactgcgtctgaacactgtaaagccggaatcgtgtcgtatgtgtactcagtgaaccctgatcaagtggcccaggtcacc

SEQ ID NO: 185 - DNA, 693 bp, synthetic construct
  source 1..693: mol_type = other DNA
atgcaatggagttcatattatgagttaacacccggcagtaagaaatacatttacattcccactgagcaatcacgtgagctgggtaagctgataatcgaaaccattagaaagcgatggacgccgccggcatacttcttccatctgcggaagggcggtcacttggcagcgatcaagcaccatatagacaaatcttgcaaaccacgtaagtttagtgtattcgacatatccgggtacttcggccaagtcaccgaaaataagttacggcgggtgctgaagaacttcgtatcattcaaggaagctagtcagtgggcttatgattctacagtcagaaagccttcggaagaccgacgtaccttgccttacggcttcttgcaaagcggagatctggcgagtttagttctggaccgaagttacttaggctgcgagtttcggaagatccaccaaaacccgaacataaagctttctgtctttgtggacgatatcattgcaagctcaagcgacccaattcttttagaagaggcctcgaacagcataattaatgcagcaaagttgtcaaatttcaagttcaatcaggacaagattcgttgcaatgtggatgaaattgagattttcaacatccactgctcccaagatttcggtttatcattcagccaagagaaattaaagaagaactcgaccaactcgaagaaactg

SEQ ID NO: 186 - DNA, 879 bp, synthetic construct
  source 1..879: mol_type = other DNA
atgctcattgacaagttttctaaggaaatcgggctcccgcggcctagtgtccaaaagatagccgcaagcgctaactacttatacaagcattacaccataccaaagcgttcaggtggagaacgcgacatctaccatcctacaccgagactgaagttagttcaacgctggattacccgccacgttatccgcgatcttcccgtgagtgacgcggcaatggcataccggaagggcaagagtatcactgataacgcgagattacatgctggaaagcgcttcttgctcaagatggacttcacggatttcttcccgtctattaaggcgcgcgacttacaacctattctgacgagccgtggttatgacccagaggatgttaacttcatactcacaatttgttttaagtcaggctcccttactatcggtgctccctcttcacccgctgtcagtaacattgttatgttcgccttggaccaggagtttaagggtatcgcggaccggcgcaagctgacctactcacgctacgccgacgacttgacatttgcgggaaacgtccgaggaaacttaatcgaagcgaagaaagacgttgaacggttgataggaacgtgggcgtctcctaacttaacacttaatcaacgtaagaccgttttggtgtcgtcggctcatagacaaaaggtaacagggattaccttaaccacggacggcgagatttccatcggtagagagaagaagagagaattgcgtgcaattgtgcaccgtagtacctaccagaaactggaaccagaggtcgaagcgtacgtacaaggttggctggcttacgctaactccattgagccgaagttcgtagactcgttgagaaagaagttcgatacataccttgacttt

SEQ ID NO: 187 - DNA, 753 bp, synthetic construct
  source 1..753: mol_type = other DNA
atgcccatcaatttcaagtttgcatacgaatgtaaaggcaagagaatcttcgtgccaaatgacgagtgcgttagacgtggtgaggcactgattaaatattgttctcaggcggttgactttccaagctacttctaccactacagagctggtgggcacgtagccgcattgcaccgtcatttggagcaccgtttcttcttccgaatcgacatcgagaacttcttttactccattagccgcaaccgagtgagcgcagtactgcatcatataggtttccgtaaggcgcgcccatacgcggagtggtcttgcgtgaagaatccttttggggcaccggcttactctttaccgatcggcttcgtgcaatctccaatgcttgcatcattagccattctgcgcagcccggtggcagccgccatagagcgcgccgccgcagcaggtgccttcgtgagtgtatattttgacgacttcatcggctccgctgttgaccgggaacctttggagaaagcgtttcaggatatactgcactcttgtcaagaagctaatctcatatcaaatcagctcaaacttgcaaagccgtctgagcacatcttggcttttaactgcgatctctctcacggtatcgccgaggtcgcagaggctcgcgtggcaaagttcttcaaggcacctcgtagtcaatgggcggaagcggcgttccgtgagtactgcaaccgcgtggcgagaaacaatcataagtccgaaggcagacggttcctgcgt

SEQ ID NO: 188 - DNA, 1719 bp, synthetic construct
  source 1..1719: mol_type = other DNA
atggctagcgcatggagtcatcctcaattcgaaaaatccggaatgaacattgaggaagtacagcgccgtctttgggagcagagtcgtgctcatcggcagcaacgtgaaagcggctcccctctgttcccggcaaacccatatgacgatcgcatccgcaagcttatggatctgatgcataatcctacatggatcgctgcagcatgtgatcgcgtactgaaacgtagccgtggcaaagcggtgggtgtggatggtgttcgcgttcgtgactttgaacgttcctgcgagcaccgtctcgaggaactgcgccttgagctgaaacgtggcacgtaccaaccgctcccgctgcgtcgtgttgaaatcccgaaagctaatggcaaaatgcggcgcctggggattgcgtgtctgcgtgataaaattgtgcaggaagcgattcgtatggcgctggaaccgatctttgaggccgaatttcatcgtaattcgtacggtttccgccccaaccgttcggctcatcatgccattgcgcaatgccgcaacgcggcactggctggctatgcgtggacgatcgaaggagatgtaaaagcgtgttttgacgaaattgcgcacaaagccatcttgcgctgtgtccgtgagaaagtgatggataacaagttcctgaacctgattgaccgtttgctgaaggccggagttgaaattgatggcgttgtgcatcctacgactaaaggtgtcccgcagggtggcgtcgcgtcaccactgctggctaacgctgtgctgaacaagttagactggttcttgcagtctaaaggtttttatgatgccgccaaacgtcgtcgttcatctcatagtttaccaaacattcgcttctgccgctatgcggatgattggtgtgtattcgtcacccgctgcgatcgtcagtatgcggagcgcttgaaggacgaaatccgcgactttctgcgggaaacctgcggactggaactgagtgccgaaaaaacccgcattacccacgtacgtgacgggtacgatttcctgggcttcaacatttcggtaggggtgggccaaagcggcaaaatggttcccaaggttaaagtcggtcgtaaagcaattgcaaatatccaacgtcgtttaggggaatccttacgctatcgtcccatgcaagaatccatttcagtccggctggtccgtacgagtgcagttatccgcggctggagcaattattttaaagcggcacataactttagccgggtcgcacacggcctcgatcataaagccttctggattaccgctaaggcgatttgccgtaaagaagatatctctactgcgaagtgttttcgtcgctatcggctgggcaataaaatcggtgtgcacgaagcgtgcaccctcgcccgctttcaggagacagcgtcaagctattactacgccgccccgaaaccgtaccagccgggttgtaaccgctaccttgacgaccacgaatgggaagccgctttagtgctgtctgaacatgcgcgcccaggttcgggagatttgaaatggaaagcattggtgcgggatggttttcattgccgcgggtgtgccgttgtggtgtccgcacgcactagccatgcagaccacatccgcccggtgaatagctttgcgaatcttgagttagccaatgatcttgataatattcagaccctgtgccgttggtgtcacaaacagaaaagtgcccgtgaactctgcgcgtga

SEQ ID NO: 189 - DNA, 1737 bp, synthetic construct
  source 1..1737: mol_type = other DNA
atggctagcgcatggagtcatcctcaattcgaaaaatccggaatgtatccgaccaaaatggctgaaaaacaggcaaaactggcagagacagcgttatcgaatccggaacatcgtttccataatctgtatgatcttatgcattggcggtattggattgaagaagcggccgcaaaagtactggcccgccctggctcgagcacggcaggcgttgatggtaaaacacgcgttgatttcgaaaaaaattacgcgaccgaaatctcccgtattgtgaccgaactcaaagataagacctatgcaccgcaacccgtccgccgcatgcatatcccgaaaggtaacggcaagacccgccctttgggaatccccattctgcgggatcggattgttcaagaggctctccgcgcgattctggatccgatctacgaaagcgactttcaacatcactcatacgggtttcgtaaaggtcgttgtactatggatgccgttgcggttctgatgccattattcaatacgcaggtcaagcactattgggttattgagggagacatcaaaagttatttcgataatgtgcaccaccgcaagcttatgaaacttctccgtcagcgtatcgctgacaaagcgctgctcgacctgatctggaaattcttaaaagcaggtgtgatggaaggtcgtttatttgcctgtacagaaactggggttccacagggcggcgtgatcagcccgttgttggctaacgtctatctgaatgaatttgataagtgggcggaacgccagtggcacaacctgaccccgtacgaccgtcagcgtcgtcgccaagcgggcttgggcaactacactatggtacgttatgccgacgattttgtgattgtgtctaacggtactcgcgcggaagtggagcgcacgaaagaggcagtgcgccgttttttggcggaagagctgcacctggaactcagcgcggagaagacactgatcactcatgtgaacgacggttttgactttttagggtttcatattcagcgctgtaaacccgaaggccgctgggtagtccacctgcgtccgaccgaaaaaaacaagcagcgcattaaacaccgcatgaaagaactgacgagtcgcaactggacctggatggatgagtacactcgtctgacggccttgaaccgcattgttaaaggctggtgcatgtattaccgttacaccagcctgcactcagatcttgaagaaattactcgttacatttggttccgttatctgcagtggctcctgcgtaaacacaaaggctcccgtaaacatcagctgatccaggaaaaaacggccgtgattcataatcgcacccgttggacggccaccgtagcccaagacggtcaggcgattaccgcccatcaatggctgccgacgccaaaagagttaaaacgcgaacgttatcgtctgaaaggccgtggcgggttcgcgcacccttatcttgagccagctctggacaccaccgataacccggaatgggaagggggtccggccgaagtcctgttcaccgaggtcatcggtgcacgcagtcgtcgtggagaaccgttagagatggctgaactgaaattacgccgtaagctgcgggatcgctttacatgtcagcattgcggctcccgggagcatcttcaagtgcatcatgtcggtcctgtaacgtctacgtcgatcgatgatctgattaccctgtgcttgaagtgccatcagcagcaacatcggcagaattga

SEQ ID NO: 190 - DNA, 1572 bp, synthetic construct
  source 1..1572: mol_type = other DNA
atggctagcgcatggagtcatcctcaattcgaaaaatccggaatgattatttctgaaatgcagcacaaacttgccacctgggcggaaagcgatcctaaccgtcgcttcgatcgtctgctgcgtctgatcgctaataaagagtggctggccgaggcggctcgcatggtactggcatccagcggtgcacggacgccgggcatcgatggcatggacaaacagcgtctgcaagtgaaactggatcagcatcttgacgatcttcgtgcctcgttattggaagaatcataccgtccgcagccggtcaaacgtatctacatccctaagagtaatggtaaacttcgcccattgggaatcccaaccctgactgatcgtatcgtccagcgcgctatgctgatggccatggaaccgatctgggaatcggactttcatcgcctcagctatggttttcgtcccgaacgttcagtgcatcacgcggttcgtacagtccgcattcaattacaggatggggcagataccacccgcggtcgttggattattgaaggtgatctggcctcttatttcgatacggtccatcaccgcttactgttaaaatgcgtgcggcgccgcgtacaagatggccgttttgtggatttgttgtaccgtttcctgaaagcagggcacattgatcgtgggttgttcacggctagtagcgagggtgtaccgcagggtggtgtgctgagcccgctcctcagtaatattatgctgcatgaattcgacatgtggctcgaagcgaagtaccttaacaagaaagcgcgcaaagatcgttgggcgtggaatttcggcatccaacagggtcgtccgatcacggtgcgtgagaatcgccagtggaaaccggctgtggcgtattgccgctacgccgacgactttgtcgtaattgttaagggcactcgcgcgcaagcggaagaaattcgcgaagagtgtcgggcattcctcgaggggaaactgaaattgactctgaacatggaaaaaactcacgtgacccatgttgatgacggctttgtgttcctgggacaccgtattatccgtaaacgcggtgctcatggccgcatgagcattgttaccaccattccgaaagagaaagccaaaggctttgttcggcgtctgacagaaacgctgtccggcaatcattccgtatccaccgtcgatatgatcgcaggacttaaccgtcaactggtgggctgggcggcattttacaaattcaccgactttacggcatatgtgtttcgtcggattgatcatgttgtgttttggaaactggcccactggctgggccacaagtatcgctcgcgtattaagcctttaatgcgtaagtggttccgtgtcccagaacccgggaaagccaaaacctggctggtatttggccgtaacgagcgcggtgacccggtgggcaaagcgctgcatcgtttagtttctagcccgaaagcgcagtttcgctggcggaacccagaagaaaacccctatatttttcgcttagaggatcgctcaacggttacaagtcattatcatgacgttgcgatggccatgggacaggcctga

SEQ ID NO: 191 - DNA, 1566 bp, synthetic construct
  source 1..1566: mol_type = other DNA
atggctagcgcatggagtcatcctcaattcgaaaaatccggaatgcagaataaactggcgacgtgggcaacggaaagtaaagaacgtaagttcgatcgtttattacgtttaattgctaaccgcgcgtggctgagcgaagcggcttcgattacgttggcgtcttcaggcgcccggacgccgggtgtggatggaattaataaacataaaatggaagaaatgcttgatcttgagctggggaaccttcggtatgagttgctgaccggtacctattgcccacgtcccgcgcgtcgtgtgtatatcccgaaagccaatggaaaacttcgtccacttgggattccttgtctgcgtgatcggattgttcagcgcgccatggttatggtaatggaaccgatttgggaaagcgattttcatccccagtcatacggtttccggccagcacgttctgttcaccacgctatccgtactattaaaatgcagctccaagatggtaatgagcgcaccgatgcaactgcaggtcgctgggtggttgagggcgatctggcatcctacttcgacaccgtgcaccatcgcttactgatgaaaagtattcgtaagcggattagcgaccgccgtttcctcaccctgctgtggcggatcatcaaagccggctgtgtcgaccgcggcttgtttcgtgcatcctctgaaggtgtaccgcagggcggagtaatctcccctctgttgtccaacattatgttacacgagttcgaccaatggatggaagccaagtttttgagtaaaaaggtgcgtaaagatcgctgggcgtggaactttggtatccaaaatgagcgtcctatcgcaatccgcgaaaatcgccagtggaaaccggctattagctattgccgttacgcggacgactttgtcgttgtggtaaaaggcacgaaagcgcatgcggatgaagtccgtgaaacctgccgcgcgtttctcgaagatcgcctcaagctgactctgaacatggacaaaacacacattactcatgtgaatgatggtttcatcttcctcggacatcgcatcattcgtaaacgcggcgccaaaggtcgcatgcgtccggtttcgagcattccgtgggataagtatcgccgctttaccgaacgtgtcgtcaaacaactgtcaggcaactttagcatgaacaccatggatctggtggagagtctgaaccgccagttggtggggtgggctaacttctaccagtacaccgaccataccgtaacaatctatggcaaagtggaccgcacggtcttttggaaactgggttattggctggcccgtaagtataaacgtggctttcgctctctgatgcgtgattacgtgcgcagcccggagaaagggaaagcaaagatttgggttctgcagggccaaaattcacgtggcttttatggggaactggcgctgaaacgcctggtcacctcgcacaaaggttggtttacgtggcgtacaccggctgaaaacccgtacacactgcgttcggaaaaaccacgcactatccagagctactatgatgacgttgccttcgccttaagtaatgcgtga

SEQ ID NO: 192 - DNA, 1566 bp, synthetic construct
  source 1..1566: mol_type = other DNA
atggctagcgcatggagtcatcctcaattcgaaaaatccggaatgattatttcggaattgcagcgtaaactggccacgtggactgcctgtgacaagactcgccgtgtcaaccgtctgttacgtttgattagccaccatgagtggttatatcaggctgcgcagattacgttatcttcgaaaggtgcaaaaacgccgggcgtcgacggcattacgaaaattcatctgcagaccaatctgcatacatatctggcgcagatctcagatgacctgcggagcgggcattatcagccaatgccggctcgtcgcatctacattcctaaagcgaatggcaaacaacgtccgcttggcatcccgaccctgcgtgatcgcatcgtgcagcgcgcgatgttgatggcaatggagccaatttgggaaaacaattttcatagcctgagttatggctttcgcccggagcgcagcgtacatcacgcgattcgtactgttaaactgcagctgacggatggccgtacctctcgtggccgctgggtggtggaaggtgacctgagctcatgtttcgatactgtacaccatcagcttctgatgaaatgcgtgcgtaaacgcatttcatgccagcgttttaaccaccttttatggcaattcattaaggccggtcatattgaacggaatcttttttgcgccacgaccgaaggggtcccgcaagggggagtaatctccccgatcctttccaatatcatgttaaacgaattcgaccaatacctgaacgagtgctatctgggaaaaaaagtccgcaaagatcgttgcaactggaactcatctattaccgataaacgccctatcgcgtcgaaagaaaaccgccagtggaaacccgctgtaagctattgtcggtatgcggatgattttctggttatcgttaaaggcaataagcagcaggcagaagccattcgtgatcaatgccgtgatttcttggaaggtaagctgaaactcacattgaacatggaaaaaacccatattacccacatcaatgacggtttcgtcttcttaggtcaccgcctcatccgtaaacgtggtgtgaaaagtaatatgcgtgtggtcaccggaatcccactgggtaaagcgaaagcgttttcgcattccttgtcccaagctctgtctggcgatcacagttgctcaaaaatcgataaagttgagcagctcagccggaaactcaagggttgggcgcaattttaccgccacaccgactttaccagcaaagtttacaacaaaattgaccgtattgttttctggaagctggcaaagtggctcgcaagcaagtaccggtgttccattaaaagtctgatgatcaagtggatcaaacgccctaaagccaataaggccaagacgtgggtgctgttcggcaaaagtaatcgcgggaatctgtgtgaagtgtcgctgtttcgtctggtatcttcgccgaaactgccctttcgctggcgtttaccggaattgaacccatatcttcgtgatgagattcgcaaaaccgtgacatccagttaccgcgatgttgctatggcagtgagccataactga

SEQ ID NO: 193 - DNA, 1674 bp, synthetic construct
  source 1..1674: mol_type = other DNA
atgaacattgaggaagtacagcgccgtctttgggagcagagtcgtgctcatcggcagcaacgtgaaagcggctcccctctgttcccggcaaacccatatgacgatcgcatccgcaagcttatggatctgatgcataatcctacatggatcgctgcagcatgtgatcgcgtactgaaacgtagccgtggcaaagcggtgggtgtggatggtgttcgcgttcgtgactttgaacgttcctgcgagcaccgtctcgaggaactgcgccttgagctgaaacgtggcacgtaccaaccgctcccgctgcgtcgtgttgaaatcccgaaagctaatggcaaaatgcggcgcctggggattgcgtgtctgcgtgataaaattgtgcaggaagcgattcgtatggcgctggaaccgatctttgaggccgaatttcatcgtaattcgtacggtttccgccccaaccgttcggctcatcatgccattgcgcaatgccgcaacgcggcactggctggctatgcgtggacgatcgaaggagatgtaaaagcgtgttttgacgaaattgcgcacaaagccatcttgcgctgtgtccgtgagaaagtgatggataacaagttcctgaacctgattgaccgtttgctgaaggccggagttgaaattgatggcgttgtgcatcctacgactaaaggtgtcccgcagggtggcgtcgcgtcaccactgctggctaacgctgtgctgaacaagttagactggttcttgcagtctaaaggtttttatgatgccgccaaacgtcgtcgttcatctcatagtttaccaaacattcgcttctgccgctatgcggatgattggtgtgtattcgtcacccgctgcgatcgtcagtatgcggagcgcttgaaggacgaaatccgcgactttctgcgggaaacctgcggactggaactgagtgccgaaaaaacccgcattacccacgtacgtgacgggtacgatttcctgggcttcaacatttcggtaggggtgggccaaagcggcaaaatggttcccaaggttaaagtcggtcgtaaagcaattgcaaatatccaacgtcgtttaggggaatccttacgctatcgtcccatgcaagaatccatttcagtccggctggtccgtacgagtgcagttatccgcggctggagcaattattttaaagcggcacataactttagccgggtcgcacacggcctcgatcataaagccttctggattaccgctaaggcgatttgccgtaaagaagatatctctactgcgaagtgttttcgtcgctatcggctgggcaataaaatcggtgtgcacgaagcgtgcaccctcgcccgctttcaggagacagcgtcaagctattactacgccgccccgaaaccgtaccagccgggttgtaaccgctaccttgacgaccacgaatgggaagccgctttagtgctgtctgaacatgcgcgcccaggttcgggagatttgaaatggaaagcattggtgcgggatggttttcattgccgcgggtgtgccgttgtggtgtccgcacgcactagccatgcagaccacatccgcccggtgaatagctttgcgaatcttgagttagccaatgatcttgataatattcagaccctgtgccgttggtgtcacaaacagaaaagtgcccgtgaactctgcgcg

SEQ ID NO: 194 - DNA, 1692 bp, synthetic construct
  source 1..1692: mol_type = other DNA
atgtatccgaccaaaatggctgaaaaacaggcaaaactggcagagacagcgttatcgaatccggaacatcgtttccataatctgtatgatcttatgcattggcggtattggattgaagaagcggccgcaaaagtactggcccgccctggctcgagcacggcaggcgttgatggtaaaacacgcgttgatttcgaaaaaaattacgcgaccgaaatctcccgtattgtgaccgaactcaaagataagacctatgcaccgcaacccgtccgccgcatgcatatcccgaaaggtaacggcaagacccgccctttgggaatccccattctgcgggatcggattgttcaagaggctctccgcgcgattctggatccgatctacgaaagcgactttcaacatcactcatacgggtttcgtaaaggtcgttgtactatggatgccgttgcggttctgatgccattattcaatacgcaggtcaagcactattgggttattgagggagacatcaaaagttatttcgataatgtgcaccaccgcaagcttatgaaacttctccgtcagcgtatcgctgacaaagcgctgctcgacctgatctggaaattcttaaaagcaggtgtgatggaaggtcgtttatttgcctgtacagaaactggggttccacagggcggcgtgatcagcccgttgttggctaacgtctatctgaatgaatttgataagtgggcggaacgccagtggcacaacctgaccccgtacgaccgtcagcgtcgtcgccaagcgggcttgggcaactacactatggtacgttatgccgacgattttgtgattgtgtctaacggtactcgcgcggaagtggagcgcacgaaagaggcagtgcgccgttttttggcggaagagctgcacctggaactcagcgcggagaagacactgatcactcatgtgaacgacggttttgactttttagggtttcatattcagcgctgtaaacccgaaggccgctgggtagtccacctgcgtccgaccgaaaaaaacaagcagcgcattaaacaccgcatgaaagaactgacgagtcgcaactggacctggatggatgagtacactcgtctgacggccttgaaccgcattgttaaaggctggtgcatgtattaccgttacaccagcctgcactcagatcttgaagaaattactcgttacatttggttccgttatctgcagtggctcctgcgtaaacacaaaggctcccgtaaacatcagctgatccaggaaaaaacggccgtgattcataatcgcacccgttggacggccaccgtagcccaagacggtcaggcgattaccgcccatcaatggctgccgacgccaaaagagttaaaacgcgaacgttatcgtctgaaaggccgtggcgggttcgcgcacccttatcttgagccagctctggacaccaccgataacccggaatgggaagggggtccggccgaagtcctgttcaccgaggtcatcggtgcacgcagtcgtcgtggagaaccgttagagatggctgaactgaaattacgccgtaagctgcgggatcgctttacatgtcagcattgcggctcccgggagcatcttcaagtgcatcatgtcggtcctgtaacgtctacgtcgatcgatgatctgattaccctgtgcttgaagtgccatcagcagcaacatcggcagaat

SEQ ID NO: 195 - DNA, 1527 bp, synthetic construct
  source 1..1527: mol_type = other DNA
atgattatttctgaaatgcagcacaaacttgccacctgggcggaaagcgatcctaaccgtcgcttcgatcgtctgctgcgtctgatcgctaataaagagtggctggccgaggcggctcgcatggtactggcatccagcggtgcacggacgccgggcatcgatggcatggacaaacagcgtctgcaagtgaaactggatcagcatcttgacgatcttcgtgcctcgttattggaagaatcataccgtccgcagccggtcaaacgtatctacatccctaagagtaatggtaaacttcgcccattgggaatcccaaccctgactgatcgtatcgtccagcgcgctatgctgatggccatggaaccgatctgggaatcggactttcatcgcctcagctatggttttcgtcccgaacgttcagtgcatcacgcggttcgtacagtccgcattcaattacaggatggggcagataccacccgcggtcgttggattattgaaggtgatctggcctcttatttcgatacggtccatcaccgcttactgttaaaatgcgtgcggcgccgcgtacaagatggccgttttgtggatttgttgtaccgtttcctgaaagcagggcacattgatcgtgggttgttcacggctagtagcgagggtgtaccgcagggtggtgtgctgagcccgctcctcagtaatattatgctgcatgaattcgacatgtggctcgaagcgaagtaccttaacaagaaagcgcgcaaagatcgttgggcgtggaatttcggcatccaacagggtcgtccgatcacggtgcgtgagaatcgccagtggaaaccggctgtggcgtattgccgctacgccgacgactttgtcgtaattgttaagggcactcgcgcgcaagcggaagaaattcgcgaagagtgtcgggcattcctcgaggggaaactgaaattgactctgaacatggaaaaaactcacgtgacccatgttgatgacggctttgtgttcctgggacaccgtattatccgtaaacgcggtgctcatggccgcatgagcattgttaccaccattccgaaagagaaagccaaaggctttgttcggcgtctgacagaaacgctgtccggcaatcattccgtatccaccgtcgatatgatcgcaggacttaaccgtcaactggtgggctgggcggcattttacaaattcaccgactttacggcatatgtgtttcgtcggattgatcatgttgtgttttggaaactggcccactggctgggccacaagtatcgctcgcgtattaagcctttaatgcgtaagtggttccgtgtcccagaacccgggaaagccaaaacctggctggtatttggccgtaacgagcgcggtgacccggtgggcaaagcgctgcatcgtttagtttctagcccgaaagcgcagtttcgctggcggaacccagaagaaaacccctatatttttcgcttagaggatcgctcaacggttacaagtcattatcatgacgttgcgatggccatgggacaggcc

SEQ ID NO: 196 - DNA, 1521 bp, synthetic construct
  source 1..1521: mol_type = other DNA
atgcagaataaactggcgacgtgggcaacggaaagtaaagaacgtaagttcgatcgtttattacgtttaattgctaaccgcgcgtggctgagcgaagcggcttcgattacgttggcgtcttcaggcgcccggacgccgggtgtggatggaattaataaacataaaatggaagaaatgcttgatcttgagctggggaaccttcggtatgagttgctgaccggtacctattgcccacgtcccgcgcgtcgtgtgtatatcccgaaagccaatggaaaacttcgtccacttgggattccttgtctgcgtgatcggattgttcagcgcgccatggttatggtaatggaaccgatttgggaaagcgattttcatccccagtcatacggtttccggccagcacgttctgttcaccacgctatccgtactattaaaatgcagctccaagatggtaatgagcgcaccgatgcaactgcaggtcgctgggtggttgagggcgatctggcatcctacttcgacaccgtgcaccatcgcttactgatgaaaagtattcgtaagcggattagcgaccgccgtttcctcaccctgctgtggcggatcatcaaagccggctgtgtcgaccgcggcttgtttcgtgcatcctctgaaggtgtaccgcagggcggagtaatctcccctctgttgtccaacattatgttacacgagttcgaccaatggatggaagccaagtttttgagtaaaaaggtgcgtaaagatcgctgggcgtggaactttggtatccaaaatgagcgtcctatcgcaatccgcgaaaatcgccagtggaaaccggctattagctattgccgttacgcggacgactttgtcgttgtggtaaaaggcacgaaagcgcatgcggatgaagtccgtgaaacctgccgcgcgtttctcgaagatcgcctcaagctgactctgaacatggacaaaacacacattactcatgtgaatgatggtttcatcttcctcggacatcgcatcattcgtaaacgcggcgccaaaggtcgcatgcgtccggtttcgagcattccgtgggataagtatcgccgctttaccgaacgtgtcgtcaaacaactgtcaggcaactttagcatgaacaccatggatctggtggagagtctgaaccgccagttggtggggtgggctaacttctaccagtacaccgaccataccgtaacaatctatggcaaagtggaccgcacggtcttttggaaactgggttattggctggcccgtaagtataaacgtggctttcgctctctgatgcgtgattacgtgcgcagcccggagaaagggaaagcaaagatttgggttctgcagggccaaaattcacgtggcttttatggggaactggcgctgaaacgcctggtcacctcgcacaaaggttggtttacgtggcgtacaccggctgaaaacccgtacacactgcgttcggaaaaaccacgcactatccagagctactatgatgacgttgccttcgccttaagtaatgcg

SEQ ID NO: 197 - DNA, 1521 bp, synthetic construct
  source 1..1521: mol_type = other DNA
atgattatttcggaattgcagcgtaaactggccacgtggactgcctgtgacaagactcgccgtgtcaaccgtctgttacgtttgattagccaccatgagtggttatatcaggctgcgcagattacgttatcttcgaaaggtgcaaaaacgccgggcgtcgacggcattacgaaaattcatctgcagaccaatctgcatacatatctggcgcagatctcagatgacctgcggagcgggcattatcagccaatgccggctcgtcgcatctacattcctaaagcgaatggcaaacaacgtccgcttggcatcccgaccctgcgtgatcgcatcgtgcagcgcgcgatgttgatggcaatggagccaatttgggaaaacaattttcatagcctgagttatggctttcgcccggagcgcagcgtacatcacgcgattcgtactgttaaactgcagctgacggatggccgtacctctcgtggccgctgggtggtggaaggtgacctgagctcatgtttcgatactgtacaccatcagcttctgatgaaatgcgtgcgtaaacgcatttcatgccagcgttttaaccaccttttatggcaattcattaaggccggtcatattgaacggaatcttttttgcgccacgaccgaaggggtcccgcaagggggagtaatctccccgatcctttccaatatcatgttaaacgaattcgaccaatacctgaacgagtgctatctgggaaaaaaagtccgcaaagatcgttgcaactggaactcatctattaccgataaacgccctatcgcgtcgaaagaaaaccgccagtggaaacccgctgtaagctattgtcggtatgcggatgattttctggttatcgttaaaggcaataagcagcaggcagaagccattcgtgatcaatgccgtgatttcttggaaggtaagctgaaactcacattgaacatggaaaaaacccatattacccacatcaatgacggtttcgtcttcttaggtcaccgcctcatccgtaaacgtggtgtgaaaagtaatatgcgtgtggtcaccggaatcccactgggtaaagcgaaagcgttttcgcattccttgtcccaagctctgtctggcgatcacagttgctcaaaaatcgataaagttgagcagctcagccggaaactcaagggttgggcgcaattttaccgccacaccgactttaccagcaaagtttacaacaaaattgaccgtattgttttctggaagctggcaaagtggctcgcaagcaagtaccggtgttccattaaaagtctgatgatcaagtggatcaaacgccctaaagccaataaggccaagacgtgggtgctgttcggcaaaagtaatcgcgggaatctgtgtgaagtgtcgctgtttcgtctggtatcttcgccgaaactgccctttcgctggcgtttaccggaattgaacccatatcttcgtgatgagattcgcaaaaccgtgacatccagttaccgcgatgttgctatggcagtgagccataac

SEQ ID NO: 198 - DNA, 1899 bp, synthetic construct
  source 1..1899: mol_type = other DNA
atggctagcgcatggagtcatcctcaattcgaaaaatccggaatgacgaaacagaaaaaattgcgccaccttgaatattatgatcttcaggaacgttttgacgaattgttcgccaaaagtaaacaaggtgaactgttcaccaaccttatggaactgattagttccgaggagaatatcaaactcgcgtaccgtaatatcaaacgtaatgaaggctctaacacgagcggtgtagacggcaaaacgattaaagatattgaacgtgtctccgcggataaactcgtagaagtcattcagaataagtttcgtttctacaaaccgaagccggttcgccgcaaagaaattccaaaacctaatggcaaaacccgtccactgggcattccgacgattgaggatcgtttggttcagcaatgcatcctgcaagttctggaacctatttgtgaagcgaagtttcatgagcgcaataacggttttcgtccgaaccgttctgccgaacatgcactcgcgcaatgctaccgtatgattcagatccagcatctgcactttgtggtggacatcgatattaaaggtttttttgacaacgtgaaccatagcaaactgatccggcagatttggtcaatgggtattcgcgacaaaaagttaatctgcgtgattaaacagatgcttaaagccccgatcattatgcccgatgggacgacaattaaacccgataaagggactccgcagggtgggattctgagtccgctgctggctaacatcgccctgaacgaattggattggtggatcagctcgcagtgggaaaccatgccgacccatactcagtataaaccgcacatcagcaaaaacggcacaatttcttgcgcgaacaaatttcgggtgcttcaggaaagtaaacttaaagagatgtacattgtgcgctatgccgatgatttcaaaattttttgccgcaaacgcagcgacgccgacaaaattttcgtcgcagtaaaaaagtggctgaaagaacgtctgaaattagagatctcggaagaaaaatcgcgggtcgtgaacctgaagaagaaatgcagcgaattcttaggcttcgaactgaaagcggttcgtaaagcgaaaaaatatgtcgttcagtcccacatctctgagaaatcaaaaaaacgcgtgacggagactttgcataaaaagattgtggagatcgagcattcgaaaaacgctaaagaactgggaattcacgtgcgccaatacaacacggtggtcttcggtattcataactattaccgggtggcaacccatatcagctgtgactgttccgcaatctacaataccattcgtaaagcaatctataatcgcttacgtggacagttaaaaagcaagggagttatccactccgccttcattcaaaaaaactacggtaagtcgaaaatgatctgctttctgggcgacgcaccgctgattccctttagctatgtgcaaaccaaaactcctcgctacaagaaggttaaaatttgtaagtacaccccggaaggccgcagcgagatccacaagtgcctgaaatttgatgaatcagtaattgcggtgttacatatgctggcgaaaagtcatatgaatgggcgctcagtcgaatatatggataatcgtgtttctctgtatgctgcccagtatggcaagtgtgctgttaccggtaaagtcttgtggatcgatgaaatccactgtcaccataaaaaacctgtctcacagggtggcaccgatgagtataagaatttgattattgttcatgtaaacgctcaccgtttaattcatgcgactaatccagaaaccatcatggtatatctgaataagctgaatctgacaaaaccacaactcaaaaaactcaacaagctgcgcacaatggcaggcaatccggcgatttga

SEQ ID NO: 199 - DNA, 1941 bp, synthetic construct
  source 1..1941: mol_type = other DNA
atggctagcgcatggagtcatcctcaattcgaaaaatccggaatgactagccgtaacaaaaaacgtcgcaaactgcgtaacgccgaatactatgacattcagtccctgctggacaaactgtatgcagatagtaaaaacggtaaagtctttaccaacttggtcgaactcatttgcttgccgcggaacgtagagttggcatatcgtaacctgaaaaagaatagcggtagtaaaactgctggtgtggacgataaaacgatcgatgatctggcgggcctgaccaatgaacagattacggactacgtccgcacgcgtctgaactactacaaaccccatcgtgtgcgtcgcattgaaattcccaaaaaaaatggtaaaatgcgcccgctggggattccgacaatctatgatcgtttaatccaacaatgcatcttgcaaatcttagaaccaatttgtgaggcaaagttctacccacattcgtatggttttcgcccgaataagtgctgcgaacatgcgatggcgcgcgcgtataaacttgctcagaatcataagctgcaccatgttgtggaagtggacattaagggattttttgacaacgtgaatcacggaaagcttctgaagcagatgtggaccctcggtttacgcgataaaaaactgatttgcatcatctcacagatgctcaaagcggaaattgccggcattggcgtgcctaccaaaggtaccccacaaggcggaattctgagtccgttgttagcgaacatcgtgctgaacgaactggattggtggatcgcgtctcaatgggaaacttttccgacgcggcaccagtatcgttccgacgtcgtccgtgaaggcaaacctgggatcaatcatggtcatcgttatcgcgcacagcgtgagagcaacctgaaagaatgctatatcgttcgctacgctgatgatttcaaaattttctgtcggaataaggtggatgcggagcgcatttttcaggctacaacccagtggctgaaggaacgtctgttcttagaaatctcgccggaaaaaagccatattgtgaatcttcgcaaaggctatagcgagttcctgggtatccgttttaaacttgtagcgaaagggaaagaaaaagacggtaaaccgaaattcgtaatccgtagccatatttgtgacagcgcagtagaaaaaatcgccgagaaaatgtatgttgagatttcaaatcttgcgcactgtgcagataaccgccagctccatgtcgttgtcgataacattaacctgtacgtattgggaattcatcagtactaccaaatggccacgcacattgttactgatctgaatcccattaaccgttccgtgctctctcgcctggaacacaagaaaaacttgaaatgcttactgacggaacaggggaatgctaaactgcctaagtatgttgtccaaaaatactcagcgtctaagtgcgtacgttatattaaaggtcgtgcactgatcccaattggctatgtgcagaccaaaccgccgatgttttcgatctccggggtttgtaagtacactgccgagggccgcagtttaatccataacaatctccagacgattaacatctctacattacactatctgatgaaccacccgaacaaaaaccgctcgatcgaatataatgataatcgtctggccttattttgtgcccaaaatggcaagtgtgcaattaccggcaaagtgttggaaattggcgatattcactgtcatcatattgttcctatccacgccggcggcaccgacaaataccagaatctgaaaattgtttgcgtggatattcataaactgatccacgctgttgatgaacgcaccatccgtggcttgctcgagaaactggagcttacagcgtatcagatcaaacggcttaactacctgcggaaaatggccggtaatcaagaactgcagaccaaagccgcgtga

SEQ ID NO: 200 - DNA, 1980 bp, synthetic construct
  source 1..1980: mol_type = other DNA
atggctagcgcatggagtcatcctcaattcgaaaaatccggaatgaagctctccatcccaaaaagtgaggaagaattccagaaactcaaagacaaactgtttgaagagacgaaaaccgccttaagccagaataagactccgatcttcaaaaacatccttgaggtagcccaatgcgacgttgtgattctgaccgcgatccacaaacttaaaggcaataaaggatccaatactgcgggtgtcgatggtgaaacaatgcgtatggacatcctgaacaaagatttcaataaagtaatgaaggaagtgaagctccagttcacccactatacgcccgataaagttcgccgcgttcacattccgaagagcaacggtgagacgcgtcctctgggtattccgaccattgcggaccgtgttgtgcaggagtgcattcgtagtgtcattgaaccgatttgtgaggcacaattttttgaacatagctatggtttccgtccgtggcgtagtacggagaatgcactgggtcgtattaccgatgtggtccagaaaacagggtatcattggattatcgagggcgatatttcaaagttcttcgataaagtaaaccataccaaactgattcgcattctgtggtcgtttgggattcaagatcgtcgcattctgatgatgatcaaagctatgctccaagccgggatcatggaagaaatcaacaaaaacgaattggggacgcctcaaggcggcattattagccccctgctggcaaacgtttatctgacaccatttgataattttgtaacgcgggaatacgagaataaaaaattacgcaagaactattcgtccggccagcgctcactcattttgcgcggcttgtcagggaaacctcgcatcaaaccgattccgtgctacctgatccgctacgcggatgattgggtggtgatcaccaacagcaaaaaaaatgcagagaaactggtgtacaagtacgaaaaatatctgcgtgaaacgctgaagctggaattatctgcgtcaaaaaccaagatcacgaatgtccgttcgaaggcgattgaatttctgggatacaaatataaacaggttcgcggcaaagcgaccaaaggctacatctcccggaccaagcctattgaagaacagctggacaaaaaaattacagaactgttaaaggacatcaaacgcctcaagaaatgcaaagacactgaaactctgatttctgacatcaatattatcaacagcaaaatccggggcctggtcaattattatcaggtgactacttggggttccgaaagcatgaaaaaatacaatcagcgcgtgcgctgggctgcttttcgtgcaatccgtcgtcgcattggtgcaaaaagtgccaaaggcaaaaataaaaaagtggattgggtgcgtgcgaatctttgtgcgaatctggtaggtattcattcgaactataccacagcgttgccaagcctgaagtataaggaacatatcgttggcgttaccgatcttgcctttattaagtttcgtcagccggttctgttgaaccagaaagagacaccctttacccaggaaggacgcgaacgtcaccttgcacgtacccgtaaacgcccgccgcaatatcgtttagattttatttttggtgcagacgcgactaccacgaaacggttactggcttctcgtaaacggaaaaatcgtctgtacaattttgagttctacctgaaccgcgcctatgccttcaaccgcgataaaggtaagtgtcgtatttgcggaaaagaaattgctccgcatgaaatccagacccaccacgtcgatccatctttgaaaacggaattagtcaacaaagtgtcgaatcttgccagtctgcatgatacgtgtcataacaacatgcataacctgaccctgaccgaacagttgttgcaagccaaaggctatacgaacaccgcggtgaaaaaaatccttaacttccgcaacaaactcgctattactttatga

SEQ ID NO: 201 - DNA, 1863 bp, synthetic construct
  source 1..1863: mol_type = other DNA
atggctagcgcatggagtcatcctcaattcgaaaaatccggaatgaccctgaacacgaaaggtaaacgtgcagaataccacgatatcctgcccttacaaaatgaattatgggaaaatgatacgccgaagaacctttacaaactgatcacaagcaaacgtaatattatttgtgcttatgactgtctgcggcgtaacactggctcacatgcaaaaggcgtggatggcttgaacatcgaagatatcaatcatgtgtccctggatcggctgatcaaaactgtacgcgcaaaactgttggattataaaccggaccctgttaaacgggtttatatcgagaaagacaacggtaagtttcgtccgctgggcattccgaccatttgggatcgcttgattcagcagtgtattaaacagattatcgaaccgatttgcgaaaaacagtttgcgcacaattcgtatggcttccgcccaaaacgttcacaagaaaatgcattagcggatgtgatgaaatccttaaacctctctaaacaccggtacattgtcaatgtggacatcaagggtttctttgataacgtgaatcacaagattctgattaatcagctctggtccatcgggatcaaagacaagagtgtactgcagattattaaaaaaatgctgaaggccaaaatcttggaaccaaacggaaaacttatgacccctagcaaaggtaccccgcagggtggcattctctctcctctcttaagtaatgtagtgttgaacgacctggatcattgggttaatgatcagtggattgaatgtggcattgaaacaccaagcatcaccattcattggaacaaaaatggcagcccgggcggcgataagtatcgtcatctgcgcaaattcagcaccttgaaagaaggtcgtctggtgcgctacgccgacgactttgtgattacgtgcaaaacttacaacgaggcggttcgttggtcgcatgccgtgaccaattatctgaaacgtcgcctgaagctggaagttgaggattcgaagagtaagattattaacctgcgcaaaaaatactcggactttctggggtttaagtttaaactgaaaaagaaacggaataagtgggtcgctgaatcccgcattagcgataaaaaaaagaaaaaaatcctcgcgagctatcgccaacagattcgtaacacttggagcggcgcggaaatctacaaacttaataccaagacattcgggctgtgggaatattttgagaatgccacagctgtttctgtcgatatgtcagagattgcctggcgcctgagtaaaatcatctacaatcacttttcgatgaacggagaatttcgctatcttaccgaagcggaactgaaaagcaccggcgtcggtattaagatgacgaaacttcagaaccattgcaaagtttgggtccagcatggggtaccagtgatgccgttatctatgggaaaaacccgctatccgttatgcaaacgccgtcaagaaaaaccctacgagttcactcgtgaaaaaaaagactggcagagttatatcattctgattgagtctaacattacgtcaagcacgctgttccacatcaataaagtttcaaagtatgctcaacaaaaaggtaagtgcgcaattttgaaacagttcacgggtctggatttccattgtcatcacatcatcccgcgttatctcgggggtgatgattcctacgaaaacctgattgtgttagaccgtcgggtccataaccttatccacgcccgctatgactggaaaatcaaagagatgatcaaagagttgaacctgaacaaacagcagattgcgaaaatcaacaaacttcgtaaccaatgcaaactgaatgagattgaaattgattga

SEQ ID NO: 202 - DNA, 1953 bp, synthetic construct
  source 1..1953: mol_type = other DNA
atggctagcgcatggagtcatcctcaattcgaaaaatccggaatggccaaacgcattgtgaataaagcagaacgtaacgccgaacgctatgatgctaaagaaatgggataccagttatatgaagatagcctcaacggtcgcgttttcgaccgtctgatgcctatgatcatttcggagcagaacattatcttagcgtatcggaatatctgtaaaaacaacgggagcaagacgccgggtactgatggcaaaacaattgttgaaatccaagaactcccaattgagatggtcattaaaaccatccgtaacaaacttaattactatcaacccaagaaggtccgtcgcgttgaaattcccaaagataacggcaaaactcgtccactgggtattccgtctatttgggatcgtctgattcagcagtgcgtgttacaagttctggaaccgatctgtgaggcaaagttccatgagcgtaacaatggttttcgcccatatcgctccacacagaatgcaattgcgcagtgctataagatggcccagctccagaacctgcattttgtagttgatgtcgatatcaccggctttttcgacaatattgaccatagcaaactgatccgccagttgtggggacttggcattcaggaccgcaaactgattatgattatcaagcagatgctgaaagccgacattttattcaacgatatcgtgattaccccggaaaccggcacccctcaaggtgggatcctgagccccctgctggctaatgttgtcctcaacgaacttgattggtgggtcgcgaatcagtgggaaatgttcaaaatcaaagagggttctacgggttatgagtttgcgaaagtcgataaagaaggcaatgttttaactgttgatcgtacccagaaatggaataaactgcgtgccaaaacggaattgaaggagatgtatattgtgcggtacgcggatgattttaaaatcttctgccgtgattacgttaccgcaacaaaagtgatgtatgccaccaaactgtggctggaagaaaacttgcacctgcagacctcggatgaaaaatctggcatcacgaaccttcgtaaaaactacacgacgtttctgggtattaagtttaaggtcgtgccgaaagggaataagtggattattcggtcccacatggctgacaaaagtaaagcaaaggtaatctcaaaactgagcagcgtgtggaaagacatcaaaaatccatctaaacaaagtgagctggacaaaaacattaatttgtacaatgcgatggtaatgggaatgcataactattattgcatggcgaccctggtgtccgctgattttgctgaaattgcttttaaagtaactggtaaaagtaacggtatgaaccacaatcggtggtgctttccgattgaaaaacagggagagatcacatccaagtacattttggaaaaatacggcaaaagcaaacaattccgttggattaatgggcgtatgatcgtgccgattggctatgtggcctacgaatatccgaaatacaaacgtcgcgaagtcaataagtacgtacgcaaatattcggacgccgagaactgtatctcattcgaagtgatgaaatatatgatggaaaacgcgcacctgtacccgaccttggaaatggcggataatgccttaagtcgttatattgcgcaaaaaggcaagtgcgcggtgacgcacaatgcattaacggttgtggatatggtgtgtgagcatattaaaccgtgtaaaggcgaacgcaatgatacctaccgtaatcttattatcctgtcaaaagaggtatcggaccttgtcggggcagaaaactcaaacaagatcgacaaaattctcaaaaacttgctgctgactaaagagatgcaggacaaaatcaacaagctgcgcgaacatcgcgaactggaacctattcaatttgatgattatatcggcaccaaaaaatga

SEQ ID NO: 203 - DNA, 1854 bp, synthetic construct
  source 1..1854: mol_type = other DNA
atgacgaaacagaaaaaattgcgccaccttgaatattatgatcttcaggaacgttttgacgaattgttcgccaaaagtaaacaaggtgaactgttcaccaaccttatggaactgattagttccgaggagaatatcaaactcgcgtaccgtaatatcaaacgtaatgaaggctctaacacgagcggtgtagacggcaaaacgattaaagatattgaacgtgtctccgcggataaactcgtagaagtcattcagaataagtttcgtttctacaaaccgaagccggttcgccgcaaagaaattccaaaacctaatggcaaaacccgtccactgggcattccgacgattgaggatcgtttggttcagcaatgcatcctgcaagttctggaacctatttgtgaagcgaagtttcatgagcgcaataacggttttcgtccgaaccgttctgccgaacatgcactcgcgcaatgctaccgtatgattcagatccagcatctgcactttgtggtggacatcgatattaaaggtttttttgacaacgtgaaccatagcaaactgatccggcagatttggtcaatgggtattcgcgacaaaaagttaatctgcgtgattaaacagatgcttaaagccccgatcattatgcccgatgggacgacaattaaacccgataaagggactccgcagggtgggattctgagtccgctgctggctaacatcgccctgaacgaattggattggtggatcagctcgcagtgggaaaccatgccgacccatactcagtataaaccgcacatcagcaaaaacggcacaatttcttgcgcgaacaaatttcgggtgcttcaggaaagtaaacttaaagagatgtacattgtgcgctatgccgatgatttcaaaattttttgccgcaaacgcagcgacgccgacaaaattttcgtcgcagtaaaaaagtggctgaaagaacgtctgaaattagagatctcggaagaaaaatcgcgggtcgtgaacctgaagaagaaatgcagcgaattcttaggcttcgaactgaaagcggttcgtaaagcgaaaaaatatgtcgttcagtcccacatctctgagaaatcaaaaaaacgcgtgacggagactttgcataaaaagattgtggagatcgagcattcgaaaaacgctaaagaactgggaattcacgtgcgccaatacaacacggtggtcttcggtattcataactattaccgggtggcaacccatatcagctgtgactgttccgcaatctacaataccattcgtaaagcaatctataatcgcttacgtggacagttaaaaagcaagggagttatccactccgccttcattcaaaaaaactacggtaagtcgaaaatgatctgctttctgggcgacgcaccgctgattccctttagctatgtgcaaaccaaaactcctcgctacaagaaggttaaaatttgtaagtacaccccggaaggccgcagcgagatccacaagtgcctgaaatttgatgaatcagtaattgcggtgttacatatgctggcgaaaagtcatatgaatgggcgctcagtcgaatatatggataatcgtgtttctctgtatgctgcccagtatggcaagtgtgctgttaccggtaaagtcttgtggatcgatgaaatccactgtcaccataaaaaacctgtctcacagggtggcaccgatgagtataagaatttgattattgttcatgtaaacgctcaccgtttaattcatgcgactaatccagaaaccatcatggtatatctgaataagctgaatctgacaaaaccacaactcaaaaaactcaacaagctgcgcacaatggcaggcaatccggcgatt

SEQ ID NO: 204 - DNA, 1896 bp, synthetic construct
  source 1..1896: mol_type = other DNA
atgactagccgtaacaaaaaacgtcgcaaactgcgtaacgccgaatactatgacattcagtccctgctggacaaactgtatgcagatagtaaaaacggtaaagtctttaccaacttggtcgaactcatttgcttgccgcggaacgtagagttggcatatcgtaacctgaaaaagaatagcggtagtaaaactgctggtgtggacgataaaacgatcgatgatctggcgggcctgaccaatgaacagattacggactacgtccgcacgcgtctgaactactacaaaccccatcgtgtgcgtcgcattgaaattcccaaaaaaaatggtaaaatgcgcccgctggggattccgacaatctatgatcgtttaatccaacaatgcatcttgcaaatcttagaaccaatttgtgaggcaaagttctacccacattcgtatggttttcgcccgaataagtgctgcgaacatgcgatggcgcgcgcgtataaacttgctcagaatcataagctgcaccatgttgtggaagtggacattaagggattttttgacaacgtgaatcacggaaagcttctgaagcagatgtggaccctcggtttacgcgataaaaaactgatttgcatcatctcacagatgctcaaagcggaaattgccggcattggcgtgcctaccaaaggtaccccacaaggcggaattctgagtccgttgttagcgaacatcgtgctgaacgaactggattggtggatcgcgtctcaatgggaaacttttccgacgcggcaccagtatcgttccgacgtcgtccgtgaaggcaaacctgggatcaatcatggtcatcgttatcgcgcacagcgtgagagcaacctgaaagaatgctatatcgttcgctacgctgatgatttcaaaattttctgtcggaataaggtggatgcggagcgcatttttcaggctacaacccagtggctgaaggaacgtctgttcttagaaatctcgccggaaaaaagccatattgtgaatcttcgcaaaggctatagcgagttcctgggtatccgttttaaacttgtagcgaaagggaaagaaaaagacggtaaaccgaaattcgtaatccgtagccatatttgtgacagcgcagtagaaaaaatcgccgagaaaatgtatgttgagatttcaaatcttgcgcactgtgcagataaccgccagctccatgtcgttgtcgataacattaacctgtacgtattgggaattcatcagtactaccaaatggccacgcacattgttactgatctgaatcccattaaccgttccgtgctctctcgcctggaacacaagaaaaacttgaaatgcttactgacggaacaggggaatgctaaactgcctaagtatgttgtccaaaaatactcagcgtctaagtgcgtacgttatattaaaggtcgtgcactgatcccaattggctatgtgcagaccaaaccgccgatgttttcgatctccggggtttgtaagtacactgccgagggccgcagtttaatccataacaatctccagacgattaacatctctacattacactatctgatgaaccacccgaacaaaaaccgctcgatcgaatataatgataatcgtctggccttattttgtgcccaaaatggcaagtgtgcaattaccggcaaagtgttggaaattggcgatattcactgtcatcatattgttcctatccacgccggcggcaccgacaaataccagaatctgaaaattgtttgcgtggatattcataaactgatccacgctgttgatgaacgcaccatccgtggcttgctcgagaaactggagcttacagcgtatcagatcaaacggcttaactacctgcggaaaatggccggtaatcaagaactgcagaccaaagccgcg

SEQ ID NO: 205 - DNA, 1935 bp, synthetic construct
  source 1..1935: mol_type = other DNA
atgaagctctccatcccaaaaagtgaggaagaattccagaaactcaaagacaaactgtttgaagagacgaaaaccgccttaagccagaataagactccgatcttcaaaaacatccttgaggtagcccaatgcgacgttgtgattctgaccgcgatccacaaacttaaaggcaataaaggatccaatactgcgggtgtcgatggtgaaacaatgcgtatggacatcctgaacaaagatttcaataaagtaatgaaggaagtgaagctccagttcacccactatacgcccgataaagttcgccgcgttcacattccgaagagcaacggtgagacgcgtcctctgggtattccgaccattgcggaccgtgttgtgcaggagtgcattcgtagtgtcattgaaccgatttgtgaggcacaattttttgaacatagctatggtttccgtccgtggcgtagtacggagaatgcactgggtcgtattaccgatgtggtccagaaaacagggtatcattggattatcgagggcgatatttcaaagttcttcgataaagtaaaccataccaaactgattcgcattctgtggtcgtttgggattcaagatcgtcgcattctgatgatgatcaaagctatgctccaagccgggatcatggaagaaatcaacaaaaacgaattggggacgcctcaaggcggcattattagccccctgctggcaaacgtttatctgacaccatttgataattttgtaacgcgggaatacgagaataaaaaattacgcaagaactattcgtccggccagcgctcactcattttgcgcggcttgtcagggaaacctcgcatcaaaccgattccgtgctacctgatccgctacgcggatgattgggtggtgatcaccaacagcaaaaaaaatgcagagaaactggtgtacaagtacgaaaaatatctgcgtgaaacgctgaagctggaattatctgcgtcaaaaaccaagatcacgaatgtccgttcgaaggcgattgaatttctgggatacaaatataaacaggttcgcggcaaagcgaccaaaggctacatctcccggaccaagcctattgaagaacagctggacaaaaaaattacagaactgttaaaggacatcaaacgcctcaagaaatgcaaagacactgaaactctgatttctgacatcaatattatcaacagcaaaatccggggcctggtcaattattatcaggtgactacttggggttccgaaagcatgaaaaaatacaatcagcgcgtgcgctgggctgcttttcgtgcaatccgtcgtcgcattggtgcaaaaagtgccaaaggcaaaaataaaaaagtggattgggtgcgtgcgaatctttgtgcgaatctggtaggtattcattcgaactataccacagcgttgccaagcctgaagtataaggaacatatcgttggcgttaccgatcttgcctttattaagtttcgtcagccggttctgttgaaccagaaagagacaccctttacccaggaaggacgcgaacgtcaccttgcacgtacccgtaaacgcccgccgcaatatcgtttagattttatttttggtgcagacgcgactaccacgaaacggttactggcttctcgtaaacggaaaaatcgtctgtacaattttgagttctacctgaaccgcgcctatgccttcaaccgcgataaaggtaagtgtcgtatttgcggaaaagaaattgctccgcatgaaatccagacccaccacgtcgatccatctttgaaaacggaattagtcaacaaagtgtcgaatcttgccagtctgcatgatacgtgtcataacaacatgcataacctgaccctgaccgaacagttgttgcaagccaaaggctatacgaacaccgcggtgaaaaaaatccttaacttccgcaacaaactcgctattacttta

SEQ ID NO: 206 - DNA, 1818 bp, synthetic construct
  source 1..1818: mol_type = other DNA
atgaccctgaacacgaaaggtaaacgtgcagaataccacgatatcctgcccttacaaaatgaattatgggaaaatgatacgccgaagaacctttacaaactgatcacaagcaaacgtaatattatttgtgcttatgactgtctgcggcgtaacactggctcacatgcaaaaggcgtggatggcttgaacatcgaagatatcaatcatgtgtccctggatcggctgatcaaaactgtacgcgcaaaactgttggattataaaccggaccctgttaaacgggtttatatcgagaaagacaacggtaagtttcgtccgctgggcattccgaccatttgggatcgcttgattcagcagtgtattaaacagattatcgaaccgatttgcgaaaaacagtttgcgcacaattcgtatggcttccgcccaaaacgttcacaagaaaatgcattagcggatgtgatgaaatccttaaacctctctaaacaccggtacattgtcaatgtggacatcaagggtttctttgataacgtgaatcacaagattctgattaatcagctctggtccatcgggatcaaagacaagagtgtactgcagattattaaaaaaatgctgaaggccaaaatcttggaaccaaacggaaaacttatgacccctagcaaaggtaccccgcagggtggcattctctctcctctcttaagtaatgtagtgttgaacgacctggatcattgggttaatgatcagtggattgaatgtggcattgaaacaccaagcatcaccattcattggaacaaaaatggcagcccgggcggcgataagtatcgtcatctgcgcaaattcagcaccttgaaagaaggtcgtctggtgcgctacgccgacgactttgtgattacgtgcaaaacttacaacgaggcggttcgttggtcgcatgccgtgaccaattatctgaaacgtcgcctgaagctggaagttgaggattcgaagagtaagattattaacctgcgcaaaaaatactcggactttctggggtttaagtttaaactgaaaaagaaacggaataagtgggtcgctgaatcccgcattagcgataaaaaaaagaaaaaaatcctcgcgagctatcgccaacagattcgtaacacttggagcggcgcggaaatctacaaacttaataccaagacattcgggctgtgggaatattttgagaatgccacagctgtttctgtcgatatgtcagagattgcctggcgcctgagtaaaatcatctacaatcacttttcgatgaacggagaatttcgctatcttaccgaagcggaactgaaaagcaccggcgtcggtattaagatgacgaaacttcagaaccattgcaaagtttgggtccagcatggggtaccagtgatgccgttatctatgggaaaaacccgctatccgttatgcaaacgccgtcaagaaaaaccctacgagttcactcgtgaaaaaaaagactggcagagttatatcattctgattgagtctaacattacgtcaagcacgctgttccacatcaataaagtttcaaagtatgctcaacaaaaaggtaagtgcgcaattttgaaacagttcacgggtctggatttccattgtcatcacatcatcccgcgttatctcgggggtgatgattcctacgaaaacctgattgtgttagaccgtcgggtccataaccttatccacgcccgctatgactggaaaatcaaagagatgatcaaagagttgaacctgaacaaacagcagattgcgaaaatcaacaaacttcgtaaccaatgcaaactgaatgagattgaaattgat

SEQ ID NO: 207 - DNA, 1908 bp, synthetic construct
  source 1..1908: mol_type = other DNA
atggccaaacgcattgtgaataaagcagaacgtaacgccgaacgctatgatgctaaagaaatgggataccagttatatgaagatagcctcaacggtcgcgttttcgaccgtctgatgcctatgatcatttcggagcagaacattatcttagcgtatcggaatatctgtaaaaacaacgggagcaagacgccgggtactgatggcaaaacaattgttgaaatccaagaactcccaattgagatggtcattaaaaccatccgtaacaaacttaattactatcaacccaagaaggtccgtcgcgttgaaattcccaaagataacggcaaaactcgtccactgggtattccgtctatttgggatcgtctgattcagcagtgcgtgttacaagttctggaaccgatctgtgaggcaaagttccatgagcgtaacaatggttttcgcccatatcgctccacacagaatgcaattgcgcagtgctataagatggcccagctccagaacctgcattttgtagttgatgtcgatatcaccggctttttcgacaatattgaccatagcaaactgatccgccagttgtggggacttggcattcaggaccgcaaactgattatgattatcaagcagatgctgaaagccgacattttattcaacgatatcgtgattaccccggaaaccggcacccctcaaggtgggatcctgagccccctgctggctaatgttgtcctcaacgaacttgattggtgggtcgcgaatcagtgggaaatgttcaaaatcaaagagggttctacgggttatgagtttgcgaaagtcgataaagaaggcaatgttttaactgttgatcgtacccagaaatggaataaactgcgtgccaaaacggaattgaaggagatgtatattgtgcggtacgcggatgattttaaaatcttctgccgtgattacgttaccgcaacaaaagtgatgtatgccaccaaactgtggctggaagaaaacttgcacctgcagacctcggatgaaaaatctggcatcacgaaccttcgtaaaaactacacgacgtttctgggtattaagtttaaggtcgtgccgaaagggaataagtggattattcggtcccacatggctgacaaaagtaaagcaaaggtaatctcaaaactgagcagcgtgtggaaagacatcaaaaatccatctaaacaaagtgagctggacaaaaacattaatttgtacaatgcgatggtaatgggaatgcataactattattgcatggcgaccctggtgtccgctgattttgctgaaattgcttttaaagtaactggtaaaagtaacggtatgaaccacaatcggtggtgctttccgattgaaaaacagggagagatcacatccaagtacattttggaaaaatacggcaaaagcaaacaattccgttggattaatgggcgtatgatcgtgccgattggctatgtggcctacgaatatccgaaatacaaacgtcgcgaagtcaataagtacgtacgcaaatattcggacgccgagaactgtatctcattcgaagtgatgaaatatatgatggaaaacgcgcacctgtacccgaccttggaaatggcggataatgccttaagtcgttatattgcgcaaaaaggcaagtgcgcggtgacgcacaatgcattaacggttgtggatatggtgtgtgagcatattaaaccgtgtaaaggcgaacgcaatgatacctaccgtaatcttattatcctgtcaaaagaggtatcggaccttgtcggggcagaaaactcaaacaagatcgacaaaattctcaaaaacttgctgctgactaaagagatgcaggacaaaatcaacaagctgcgcgaacatcgcgaactggaacctattcaatttgatgattatatcggcaccaaaaaa

SEQ ID NO: 208 - DNA, 1317 bp, synthetic construct
  source 1..1317: mol_type = other DNA
atggctagcgcatggagtcatcctcaattcgaaaaatccggaatggacggttcgaagctcaaagttaaaagtttcgaaatcccgaaacgcctggtctatgaagcgtgggaaaaagtgcgggcaaataaaggtgcccctggcgttgatgcagttagcatcaaccagttcgctgcggccgaagccgataacctgtacaagctttggaaccgtatgtcatctggtagttatatgcccggagccgtgcgcgcagttgagatccctaaagatcacgggttaggcgtccgtacgctgggtgtagccaacaccgcggatcgtgtggcccagacagccgctgcgatgctgttagaagaacgcctggaaccaatctttcatccggactcgtatggctatcgtccaggccgctcagctcacgatgcgctggctgtggcgcgcaaacgttgttggtcgcaggactgggtgattgatcttgacattcgcgcttttttcgattccgtaccgcacgacttgttactgaaagctgttgcacatcataccgaagaacgttgggtgttgctgtacattgagcgttggctgaaagcaccaatgcagatgccggacgggacactggtggcccgcgaacgcggcaccccacagggtagtcccatctctccgctgttggcgaatctttttatgcattacgcctttgaccgttggatggcgcgcgatcacccgggttgtccgtttgagcggtatgccgatgatattgtcgcacattgcgacagcaaagaacaggcctgcagcctgctggcggcgattgcggaacgtctcggggcagttggcctggagttgcatccggataaaaccaagattgtgttttgcaaggatgccaatcgtccgggtaccagcgaacacacgagctttgatttcctgggttatactttccgtggacgtctggctcccggtcctcgcggctactttgtatccttttccccggcgatgagtaccaaagccaaaaaagcggtcggccaaaaggttcgcgcgtggcatctgaatcgccgtacgggcacggatctctcaggtttagccgaggatattaacccgcacgtgcgcgggtggattaattactacggagcgttctatcgttcggagctgcacagcctcgctcgccgtatcgatgaacatcttgtccgctgggcgatgcacaagttcaaacggttgcgtggcaaaccgtctcgggcatgggactgggtggcggcagcgcgtcaacgccaacctaaactttttgcacattggcatctggtaagctccactcgtggccgtttagtcggcgcagtatga

SEQ ID NO: 209 - DNA, 1284 bp, synthetic construct
  source 1..1284: mol_type = other DNA
atggctagcgcatggagtcatcctcaattcgaaaaatccggaatggcgaaaagttttaatctgtctaagttcgctgtctgggatgcttacctggctgttaaagcgaataaaggtagcgcgggcattgatggacagacgatggaagatttcgaaagcgacttgaaatgtaacctttacaagatctggaaccgtctgtcgtcaggtagctatttcctgccgccggttcggcgcgttgaaattcccaaaagtaatggtacgttgcgcccacttggcattccgaccatttcggaccgtatcgcgcaaatggtgattaaaaaacgcctggagcctctggtggaaccacattttcatgatgattcctatggctaccgtcctaacaaaagcgccctggacgcaattgcacagactcgccgtcgttgttggcgcgatgactgggttttagatatggacatccagggcttttttgacgccctcgatcacaaacttgtgatgatcgcggtgtcgcgcttcacccagtgtaagtggacgatgctgtacatcgaacgttggctgaaagcagatgtcgtgatgccgaacggggaacgtgtcaaacggacccaaggtaccccgcagggcggcgtggtcagcccgttgattgccaatatctttctccatctgggttttgattcctggatgcagaaagaattcccgtgcatccattttgaacgttatgcggacgatattgtagtacattgtcgttcccagaagcaactggaatacattggacagatgattaaaagtcgcttcgcgcaatgcaaactgtctttatgccaggagaaaacaaaaatcgtatactgcaaagattcgaaacgtttagggacctactcatcacaatcttttgacttcctgggttatacattccgcccgcgctcctgccgtgataaagagggcaagttttttgtcagtttcacccccgccgtgtctcgcaaaagtatgaaagccattcggctgaaaatcaaggaacacccaatggtgaaagggtgtttttcacagggaattagcgaattggcacgtgcgattaaccctatgattcaaggttggattaattattatggccattttcgcaagagcgagatgagcactatctatgattatatcaacgagaaaatcatgaagtgggcgatgcgcaagtttaaacaccttcagcggcgtaaaaaacgtgccggccagtggctgcgcaaactgtattccaaagccccgttactcttcgctcactggcgtatttggaaatgggttgcagaatga

SEQ ID NO: 210 - DNA, 1347 bp, synthetic construct
  source 1..1347: mol_type = other DNA
atggctagcgcatggagtcatcctcaattcgaaaaatccggaatgtcaaccgaattagagcgtatcagtaagcttgctggcgaaaatcggcagctcaaattcttgtcaatcgcccacctgctgacgcctgaggcgctgatggaagcgtttaaaagtctgcgcaaagatgcgtcggccggtgttgacggtgttgcgtacggtgagtatcgtatggaagctggccgccgtattcaggagttatatgaacgggtccgcggaaaacgctatcgtgcccagccgttgcgtcgcatctacattccgaaagaaggcggaaaacagcggccgatcagcatccccacagtcgcagatcgcatcgcccaaactgttgtcactatggttttagaaccagaggtggagccgcgctttcatccggactcctatggttatcgtccgggccgctccgcactggatgccgttgggaaagctcgcgaacgttgctggcgttacgactgggtaattgatcttgatatcaaagcattttttgactctctcgattgggacctggtggaacgcgctgttgcgcatcataccgagctggcgtgggtccgcctctacattgcacgttggctgcgtgccccggtgcaaaaaccagatggtaccgtagaactccgtaccaaaggcacgcctcaagggggtgtggcgtctccgctgctttccaatctgtttctgcactatgcatttgatatgtggatgcagcgttcgtttccgtcagtaccattcgaacgctatgcggatgatgcgattgtccactgtggctcggaacgtcaagcaaaaatggtcttgagtgcgattcgtgaccgctttgctgagtgcggtctggaactgcatcctaccaaaacccggatcgtgtattgccaggatagcgaccgcctgggcaagtacgagcatgtgagtttcgacttcttaggctacacgttccagccacgtcgtgctaaaaaccatcgtggaaagttcttcgtgagcttcttacccgcgattagcacaaaagccgcaaaagccattcgcgccactattcgcgaatggcgtctggccagcacgcgtaacaaccagtcgctggaagatcttgcccagctgattaacccggtggtacgcggctggatgaactattacggccggtattatcgctctaagtgtgttcaagtgctgcgccacgtgaatcttgcgttggcggcttgggcacgtcgtaagtaccgccgttttaaacgtcgtgaacgcgaatccctgcactggttaggtcgtattgcgcggcgtgatcccaatctgtttgtgttgtggcgcctcgggatccgcccggaagcagggagctga

SEQ ID NO: 211 - DNA, 1290 bp, synthetic construct
  source 1..1290: mol_type = other DNA
atggctagcgcatggagtcatcctcaattcgaaaaatccggaatgaatgaagccaaaccatttgttgtcgaaaaacgcgttgtgatggaaagctggctgcaggtcaaagcaaatcgcggctctgcgggcatcgacggaatcgatttgaaatcctacgagtctaacctgcagaagaacctgtataaactttggaatcggatgagtagcggctcttacttcccgaaagcggtcaaacttgtagaaattcccaaacctaacgggggcaaacgtccgctcggtatcccaaccgtagaagatcgggttgctcagatggttgtcgtaatgtatatcgctccgcgtctggaagccatttttcacgatgatagttatggttatcgtcctatgcgtagcgcgcattcagcgatcgctaaagcaattgagcgctgcaatgaaaatttgtgggtgctggatatggacatctctaagtttttcgataccattgatcgcggtttactgatgaaggcggtgcaaaaacatgtttccgaaaaatggattctgttgtacattgaacgttggctcaaagtgccgtatcagacgagcgatggcggtgttgtagaccgtatgatgggcgttcctcaagggtcggtcattggcccggtactggccaaccttttcctgacatatgtgtttgatttgtggatgaagcattactttccgacgattccgtttgaacgttatgctgatgacaccatctgccactgccgcacggagaaacagacccaatatctgaaagcatgcctggtgaagcgtttcgccgattgtggattaaagctcaatgaggaaaaaacgaagattgtctactgtaaagacagcaaccgtaaaggcaattccgaacataccagctttgacttcttaggttatacttttcgcccgcgtaaagcaaaaaactcaaaaacagggcagattttcaccgccttttcaccagcaattagcaaaaaaagtatgatgaaaatcaaaaccgaaattcgctcgtggcatctgaaccgtcaaactcatctgagcatcgaacagatcgcggaacgtattaatcccatcgtgtcgggttggatgaactactatacgcgctttggtaaaagtgagttctggaaggtgatgtcctacctgaacgagcgtttatcgcggtgggtgaaacgcaagtataaacgtttccgcactaaactgtcgaaagcgtacgactggcttgtggagtgtgccgcgcataaccgccacatgttttcacactggatgagtggctacatcccgcactcctga

SEQ ID NO: 212 - DNA, 1293 bp, synthetic construct
  source 1..1293: mol_type = other DNA
atggctagcgcatggagtcatcctcaattcgaaaaatccggaatgatccagacgaaaagtcaggacatcaccaaacgccaggtatgggaagcctataagaaagtgaaacgtaacaaaggtagcgcgggcgtggacggtgtcgattttgaaacatttgaggcgaaccttgagaacaatctctacaagctttggaatcgcctgagctcaggatcgtatatgccgcctgctgtcctgcgcgtagaaatcccgaaaagtgatggcggtgttcgtgtcctggggattccgaccattgccgaccgcgtggcccagatggttgttaaagactacctggagccgaaacttgaaaaaatttttcataacgattcctatggttaccggcctaaaaaatccgcacaccaggctctggaaacgacccgtaaacgttgttggcagtacccctttgttctggatctggatatcaaaggcttctttgataacattgaccatgagctgatgatcaaagcactggaattgcacatggataccaagtgggaaatgttatacatcaaacgttggttagtagctccggttcaaacaaaagaaggcctgcaacaacgcgagcgtggtacgccgcagggtggggtgatctctccactgctggcgaacttgttcttgcattatgcgttcgacgtctggatgcggaagaactatcctaccattccgttcgagcgctatgcagacgatgccgtgtgccattgccgcagccagcgtgaggcccaacagctgaaagccgatctgagccagcgcatggaagcgtgtaaacttgaattacacccggataaaactaaagtcgtgtactgcaaagatgacaagcgtcgtggcgaatatgaaaatgtctcattcgactttctgggctttacctttcagccccgtgtggccaaaaactcaaagacgggagagttctttgtaggctttaatccggcgattagcactaaagcggcaaaacgtattcgcctggttatgcgtcgttggaaagtgcaactgatgtcccacctctcgctcgaagaattatcggatcgcttgtctcgcgtgatccgcggctgggtgaattactattctattttcgcacggcacaaacttctggatgtgatgcgctatttcgatcgccgtttagaacgttgggcaaagcgtaagtttaaaagtctcaaacgtcgtcaagggcgcgcgcataagtggttgatgcgtattgcgcggaaagaaccaaatctgtttccacattggcagatgaaatatgctaagctgactgttcgctga

SEQ ID NO: 213 - DNA, 1275 bp, synthetic construct
  source 1..1275: mol_type = other DNA
atggctagcgcatggagtcatcctcaattcgaaaaatccggaatgcatgatatttctaaagaagaaccttttcgtgcctgggaacgcgttaaaaaagcaggtgggggcgcaggctacgacgggaagaaaatccaagacgttcagctggaccttgataatcagctgtacaaaacatggaaccggttgagcagcggctcctacatggcggccccggtacttctggtcgagattccgaaagctggcggcggcaaacgcaccctgggtattccaacggtcatggatcgcgtagcacagatggttatcaaagatcgcctcgaacagatcttagagccgaagttccacaaagattcttacgcgtatcggccagacaaaagtgcgattgatgctgtgggtaaagcgcgtgagcgctgctttcaacgcaagtgggtgattgaccttgatatcaaagggtttttcgacaacattgatcactccatgatgatggagttcctgctgcaacatacgaaagacaagacgatcgtaatgtatgtgcaacgttttttaactgccaaagctattaaggatgatggcacaaccgttgaacgtacgaaaggtaccccgcagggcggagtgatttccccgttattggccaacctgtatctgcatgaagcgtttgatatgtggatgaaagagcatctgcctaatgtgcagttcgaacgttatgctgatgacgtgattgcacattgtgcgaccgaaaaacaggcgcaagatgtgttggaagaaatccgcgagcggctgttgttgtacaagttagaactccatcccgagaaaacgaaaattatctatgttggctcaggtaaagatcccgagaataaaccgccgcgtaagtttacctttctgggctacgaattcaagccacgtggttatgtgaaagataaaatttggcacatgacctttaccccttcgattggagcgaaagctctcaaggccatccagattaaaatggacgaatggtcgctgcatagtcgtacattctctaaactgtcggacatctcacaggaaaaaagcgcgatcattcgtggttggatcgaatattatggtcattatcgccgcagcgaactgtacaagctggcaatccgcattgattggaaactggtccgttggctcaaacgtaagcacaaaagtctgcgtagcactgataaagcctggcaggccttacgttcagtcaaaaaaggatggccgaaactttttccccactggcacatgattccgaccccgccaactcgcgcagtctga

SEQ ID NO: 214 - DNA, 1272 bp, synthetic construct
  source 1..1272: mol_type = other DNA
atggctagcgcatggagtcatcctcaattcgaaaaatccggaatgattgattattacgaaaccaagcagcaccccgtaaccaaaaaaatggtcttggacgcgtacaagaaagtacgtgagaacaaaggttcggcgggcatggatgaacagaccctcgaggacttcaaacttaaggcaagcacgaacctgtatcaaatttggaaccgcatgacttcaggatcgtactatccgaatgccatcaaacaggttctgattccgaaaaagagcggtggtacacgtagcctgggcgtgcccaccgtgagcgatcgtatcgcgcagcaggtggtgaaaagttatcttgaagccaaagttgaagcatccttccatcaagattcctatgggtatcgccctaataaaagtgctcatcaggccttggatgtcgctaaaggccgctgctcttactatagctgggtactggacatcgatatcaaaggatttttcgataacatcgatcacgaattaatgctcaaagcattgaagcgctatacgcaggaaaaatggattctgaactacgtcgaacgttggttgaaggtcggcgtctttaatggcaatgaggtggaatcccgcgaaaaaggcactccgcagggcggcgtgattagtccattactggccaatatttttcttcactttgcttttgacatgtggatgctgaaaatctacccgcacgttccattcgaacgttattgcgacgatgtaattattcattgttcaggtaaggaacaggcgctgctgatgaaaatggcgattgcgaaacgcatgaaagagtgtaagctggagctcaacgagcagaaaacgcaaatcgtgtactgtcgcaaccagattcataaagagaagtacgaacaggtgtcgtttgacttcctggggtacacatttcggcctcgttattgcccgactaaaaaaggtctgtccctgctcttcaccccgtgcatgtctacgcattcaaaaaacgatgtgcgggaaaaaatccgcaaagttatcaatcgttcttttaaaggaagtgtacaacaacttgcacagatgctgaaccaaaaagtgcgtggttggttccagtactactgtcagtataataagtataccacggttgggctgtggtattggctgaacgcgaaagttattaattgggtcatggaaaatcggcattttggtatgcgccgtgccgttcgttggttaaaaaccatctattcgaccaacccagatatgtttattcactggcaattaagccatccgtggtga

SEQ ID NO: 215 - DNA, 1296 bp, synthetic construct
  source 1..1296: mol_type = other DNA
atggctagcgcatggagtcatcctcaattcgaaaaatccggaatgatctttaaagaacagactaaaagtgttccaatcacgaaagaaatggtctgggaatcgtataagaaagtaaaaagtaatggtggtagcgctggcattgatcaacagagcttaagtgaatttgatcgtgttcggtccaaagaactgtacaaactgtggaaccgcctggcatccggtagctatttcgccccggcaattaaacgtgttaccatcccgaaagcagggggaaaaacacgtccgctgggcatccccaccgtgtctgatcgcattgcacagcaggtggtaaaaacgtatcttgaacctcgtctggaatcggtgtttgtagacaattcttatggatatcgtccgaacaagaacgcgcacaccgccattcaatcagtgcagcaaaacgttcgtcgctacagctgggtgattgaccttgacatccaggaattcttcgagaacgtgaatcacgagttgctgctgaaggctttagagcgccacgtcagcgagaaatgggttttactgtacattaaacggtggctcgaggctcctgtcattttggaagatggtgcggttaaagtcagcacgggcaaaggcactccgcagggtggggtgatttcaccgctgctcgccaatctgtacatgcattattgcgttgataagtggctggaaaaatttcatccaagtgtgattatggtgcgctacgccgatgatctgattattcattgctcgtcttaccaggaagcggttcgtaccctgacagaccttaaagatcgcttggaaaaatgtggtttgcgtgcgcatccagagaaaaccaaaattgtctattgcaaaaaggaaggccggaaccttaatgactacccggtccagtttgattttttaggtttttcttttcaaccgatgcgcaatcgtttacgcaatggcggctcgtttctgcaattcgattgtaaaatgagccgtaaaagtaaagtccgcatcaatggggaactccgcaagctcaacttccataataagacccagcgcggcatccaggacctggcgatcctgctgaacccgaaaattcggggatgggtgcaatactatggcaaaatctcacgtcgtagcttgaaacccgtgttctattatctgcaccatcgtctcatccgctggatcctgaacaaatataagtccttcaaaggttccaaagtaaaggcggtgaagtggctgcgtcaggtaacggtgtcatatcctaacctgttttaccactgggagttagggtataaacttgtttga

SEQ ID NO: 216 - DNA, 1287 bp, synthetic construct
  source 1..1287: mol_type = other DNA
atggctagcgcatggagtcatcctcaattcgaaaaatccggaatgaccggcaagagttatgatattccgaaaactctggtgtgggaagcgtggcttcgcgttaaagcaaaccgcggcgccgcagggattgatgcggagacaattgaacgctttgaaactaaactggcggccaatctttatgaattatggaaccgtatgtctgccggcagctactttccgccgccggtaaaagcagtgccaatccctaaaaaatcaggcggggtgcgtgtgctgggggtaccgaccgtgagcgatcgcatcgctcagaccgcggtcaaaatgtggctggagccacgtctggatcctctctttcatgaagatagttacggctatcgtccgggcaagagcgctttagaagctattgccgttacgcgccgtcgttgttgggaccgcgattgggtcgtggaatttgatatcaaaggactgttcgacaatcttgatcatggactgctcatgaaagcgttgcgcaaacactgcgaagagccctggatcctgctgtatgtggaacggtggctgacggcaccgatgcagtcggccgatggtcgtgttcagacgcgtttcaaaggcaccccacaaggcggtgttgtatcgcccctcttggccaatctgtttttgcattatgcgttcgacacatgggttgcgcgccacctgccgggtgttcggtttgcgcggtatgcggatgatgctgtgttacattgcaaaagccgtcgccaagccgagtatgtgctggaccgtatccgtgagcgctttcctgcttgtaaactggagttgcatccgggtaagactcgtattgtatattgcaaagacgtcaaccgtacggaagataatcccgatattcagttcaccttcttagggtacacctttcgccctcgtcgcgccgccgataagtacggtcgcatctacgttaacttctccccagcagtctcgcgtgacgccctgaaagcgatgcgccagacgattcgcggttggcgggtgcaattgaaaaatgacaaaagtctggcggacctttccgcgatgttcggcccgattctgcgtggctggcgtcagtactacggtcgctttcacggctctgcattagaatccgtctggcgtcgtatgaaccgtgcactcatcggatggctgatgcgtaaacataagaaattagcccgccgtaagctgcgcgcggcagaaaccctggaacgcatggcgaaacggcagccgcgtgcttttgtccactggagcatgggttatctttcatctgtaggttga

SEQ ID NO: 217 - DNA, 1272 bp, synthetic construct
  source 1..1272: mol_type = other DNA
atggacggttcgaagctcaaagttaaaagtttcgaaatcccgaaacgcctggtctatgaagcgtgggaaaaagtgcgggcaaataaaggtgcccctggcgttgatgcagttagcatcaaccagttcgctgcggccgaagccgataacctgtacaagctttggaaccgtatgtcatctggtagttatatgcccggagccgtgcgcgcagttgagatccctaaagatcacgggttaggcgtccgtacgctgggtgtagccaacaccgcggatcgtgtggcccagacagccgctgcgatgctgttagaagaacgcctggaaccaatctttcatccggactcgtatggctatcgtccaggccgctcagctcacgatgcgctggctgtggcgcgcaaacgttgttggtcgcaggactgggtgattgatcttgacattcgcgcttttttcgattccgtaccgcacgacttgttactgaaagctgttgcacatcataccgaagaacgttgggtgttgctgtacattgagcgttggctgaaagcaccaatgcagatgccggacgggacactggtggcccgcgaacgcggcaccccacagggtagtcccatctctccgctgttggcgaatctttttatgcattacgcctttgaccgttggatggcgcgcgatcacccgggttgtccgtttgagcggtatgccgatgatattgtcgcacattgcgacagcaaagaacaggcctgcagcctgctggcggcgattgcggaacgtctcggggcagttggcctggagttgcatccggataaaaccaagattgtgttttgcaaggatgccaatcgtccgggtaccagcgaacacacgagctttgatttcctgggttatactttccgtggacgtctggctcccggtcctcgcggctactttgtatccttttccccggcgatgagtaccaaagccaaaaaagcggtcggccaaaaggttcgcgcgtggcatctgaatcgccgtacgggcacggatctctcaggtttagccgaggatattaacccgcacgtgcgcgggtggattaattactacggagcgttctatcgttcggagctgcacagcctcgctcgccgtatcgatgaacatcttgtccgctgggcgatgcacaagttcaaacggttgcgtggcaaaccgtctcgggcatgggactgggtggcggcagcgcgtcaacgccaacctaaactttttgcacattggcatctggtaagctccactcgtggccgtttagtcggcgcagta

SEQ ID NO: 218 - DNA, 1239 bp, synthetic construct
  source 1..1239: mol_type = other DNA
atggcgaaaagttttaatctgtctaagttcgctgtctgggatgcttacctggctgttaaagcgaataaaggtagcgcgggcattgatggacagacgatggaagatttcgaaagcgacttgaaatgtaacctttacaagatctggaaccgtctgtcgtcaggtagctatttcctgccgccggttcggcgcgttgaaattcccaaaagtaatggtacgttgcgcccacttggcattccgaccatttcggaccgtatcgcgcaaatggtgattaaaaaacgcctggagcctctggtggaaccacattttcatgatgattcctatggctaccgtcctaacaaaagcgccctggacgcaattgcacagactcgccgtcgttgttggcgcgatgactgggttttagatatggacatccagggcttttttgacgccctcgatcacaaacttgtgatgatcgcggtgtcgcgcttcacccagtgtaagtggacgatgctgtacatcgaacgttggctgaaagcagatgtcgtgatgccgaacggggaacgtgtcaaacggacccaaggtaccccgcagggcggcgtggtcagcccgttgattgccaatatctttctccatctgggttttgattcctggatgcagaaagaattcccgtgcatccattttgaacgttatgcggacgatattgtagtacattgtcgttcccagaagcaactggaatacattggacagatgattaaaagtcgcttcgcgcaatgcaaactgtctttatgccaggagaaaacaaaaatcgtatactgcaaagattcgaaacgtttagggacctactcatcacaatcttttgacttcctgggttatacattccgcccgcgctcctgccgtgataaagagggcaagttttttgtcagtttcacccccgccgtgtctcgcaaaagtatgaaagccattcggctgaaaatcaaggaacacccaatggtgaaagggtgtttttcacagggaattagcgaattggcacgtgcgattaaccctatgattcaaggttggattaattattatggccattttcgcaagagcgagatgagcactatctatgattatatcaacgagaaaatcatgaagtgggcgatgcgcaagtttaaacaccttcagcggcgtaaaaaacgtgccggccagtggctgcgcaaactgtattccaaagccccgttactcttcgctcactggcgtatttggaaatgggttgcagaa

SEQ ID NO: 219 - DNA, 1302 bp, synthetic construct
  source 1..1302: mol_type = other DNA
atgtcaaccgaattagagcgtatcagtaagcttgctggcgaaaatcggcagctcaaattcttgtcaatcgcccacctgctgacgcctgaggcgctgatggaagcgtttaaaagtctgcgcaaagatgcgtcggccggtgttgacggtgttgcgtacggtgagtatcgtatggaagctggccgccgtattcaggagttatatgaacgggtccgcggaaaacgctatcgtgcccagccgttgcgtcgcatctacattccgaaagaaggcggaaaacagcggccgatcagcatccccacagtcgcagatcgcatcgcccaaactgttgtcactatggttttagaaccagaggtggagccgcgctttcatccggactcctatggttatcgtccgggccgctccgcactggatgccgttgggaaagctcgcgaacgttgctggcgttacgactgggtaattgatcttgatatcaaagcattttttgactctctcgattgggacctggtggaacgcgctgttgcgcatcataccgagctggcgtgggtccgcctctacattgcacgttggctgcgtgccccggtgcaaaaaccagatggtaccgtagaactccgtaccaaaggcacgcctcaagggggtgtggcgtctccgctgctttccaatctgtttctgcactatgcatttgatatgtggatgcagcgttcgtttccgtcagtaccattcgaacgctatgcggatgatgcgattgtccactgtggctcggaacgtcaagcaaaaatggtcttgagtgcgattcgtgaccgctttgctgagtgcggtctggaactgcatcctaccaaaacccggatcgtgtattgccaggatagcgaccgcctgggcaagtacgagcatgtgagtttcgacttcttaggctacacgttccagccacgtcgtgctaaaaaccatcgtggaaagttcttcgtgagcttcttacccgcgattagcacaaaagccgcaaaagccattcgcgccactattcgcgaatggcgtctggccagcacgcgtaacaaccagtcgctggaagatcttgcccagctgattaacccggtggtacgcggctggatgaactattacggccggtattatcgctctaagtgtgttcaagtgctgcgccacgtgaatcttgcgttggcggcttgggcacgtcgtaagtaccgccgttttaaacgtcgtgaacgcgaatccctgcactggttaggtcgtattgcgcggcgtgatcccaatctgtttgtgttgtggcgcctcgggatccgcccggaagcagggagc

SEQ ID NO: 220 - DNA, 1245 bp, synthetic construct
  source 1..1245: mol_type = other DNA
atgaatgaagccaaaccatttgttgtcgaaaaacgcgttgtgatggaaagctggctgcaggtcaaagcaaatcgcggctctgcgggcatcgacggaatcgatttgaaatcctacgagtctaacctgcagaagaacctgtataaactttggaatcggatgagtagcggctcttacttcccgaaagcggtcaaacttgtagaaattcccaaacctaacgggggcaaacgtccgctcggtatcccaaccgtagaagatcgggttgctcagatggttgtcgtaatgtatatcgctccgcgtctggaagccatttttcacgatgatagttatggttatcgtcctatgcgtagcgcgcattcagcgatcgctaaagcaattgagcgctgcaatgaaaatttgtgggtgctggatatggacatctctaagtttttcgataccattgatcgcggtttactgatgaaggcggtgcaaaaacatgtttccgaaaaatggattctgttgtacattgaacgttggctcaaagtgccgtatcagacgagcgatggcggtgttgtagaccgtatgatgggcgttcctcaagggtcggtcattggcccggtactggccaaccttttcctgacatatgtgtttgatttgtggatgaagcattactttccgacgattccgtttgaacgttatgctgatgacaccatctgccactgccgcacggagaaacagacccaatatctgaaagcatgcctggtgaagcgtttcgccgattgtggattaaagctcaatgaggaaaaaacgaagattgtctactgtaaagacagcaaccgtaaaggcaattccgaacataccagctttgacttcttaggttatacttttcgcccgcgtaaagcaaaaaactcaaaaacagggcagattttcaccgccttttcaccagcaattagcaaaaaaagtatgatgaaaatcaaaaccgaaattcgctcgtggcatctgaaccgtcaaactcatctgagcatcgaacagatcgcggaacgtattaatcccatcgtgtcgggttggatgaactactatacgcgctttggtaaaagtgagttctggaaggtgatgtcctacctgaacgagcgtttatcgcggtgggtgaaacgcaagtataaacgtttccgcactaaactgtcgaaagcgtacgactggcttgtggagtgtgccgcgcataaccgccacatgttttcacactggatgagtggctacatcccgcactcc

SEQ ID NO: 221 - DNA, 1248 bp, synthetic construct
  source 1..1248: mol_type = other DNA
atgatccagacgaaaagtcaggacatcaccaaacgccaggtatgggaagcctataagaaagtgaaacgtaacaaaggtagcgcgggcgtggacggtgtcgattttgaaacatttgaggcgaaccttgagaacaatctctacaagctttggaatcgcctgagctcaggatcgtatatgccgcctgctgtcctgcgcgtagaaatcccgaaaagtgatggcggtgttcgtgtcctggggattccgaccattgccgaccgcgtggcccagatggttgttaaagactacctggagccgaaacttgaaaaaatttttcataacgattcctatggttaccggcctaaaaaatccgcacaccaggctctggaaacgacccgtaaacgttgttggcagtacccctttgttctggatctggatatcaaaggcttctttgataacattgaccatgagctgatgatcaaagcactggaattgcacatggataccaagtgggaaatgttatacatcaaacgttggttagtagctccggttcaaacaaaagaaggcctgcaacaacgcgagcgtggtacgccgcagggtggggtgatctctccactgctggcgaacttgttcttgcattatgcgttcgacgtctggatgcggaagaactatcctaccattccgttcgagcgctatgcagacgatgccgtgtgccattgccgcagccagcgtgaggcccaacagctgaaagccgatctgagccagcgcatggaagcgtgtaaacttgaattacacccggataaaactaaagtcgtgtactgcaaagatgacaagcgtcgtggcgaatatgaaaatgtctcattcgactttctgggctttacctttcagccccgtgtggccaaaaactcaaagacgggagagttctttgtaggctttaatccggcgattagcactaaagcggcaaaacgtattcgcctggttatgcgtcgttggaaagtgcaactgatgtcccacctctcgctcgaagaattatcggatcgcttgtctcgcgtgatccgcggctgggtgaattactattctattttcgcacggcacaaacttctggatgtgatgcgctatttcgatcgccgtttagaacgttgggcaaagcgtaagtttaaaagtctcaaacgtcgtcaagggcgcgcgcataagtggttgatgcgtattgcgcggaaagaaccaaatctgtttccacattggcagatgaaatatgctaagctgactgttcgc

SEQ ID NO: 222 - DNA, 1230 bp, synthetic construct
  source 1..1230: mol_type = other DNA
atgcatgatatttctaaagaagaaccttttcgtgcctgggaacgcgttaaaaaagcaggtgggggcgcaggctacgacgggaagaaaatccaagacgttcagctggaccttgataatcagctgtacaaaacatggaaccggttgagcagcggctcctacatggcggccccggtacttctggtcgagattccgaaagctggcggcggcaaacgcaccctgggtattccaacggtcatggatcgcgtagcacagatggttatcaaagatcgcctcgaacagatcttagagccgaagttccacaaagattcttacgcgtatcggccagacaaaagtgcgattgatgctgtgggtaaagcgcgtgagcgctgctttcaacgcaagtgggtgattgaccttgatatcaaagggtttttcgacaacattgatcactccatgatgatggagttcctgctgcaacatacgaaagacaagacgatcgtaatgtatgtgcaacgttttttaactgccaaagctattaaggatgatggcacaaccgttgaacgtacgaaaggtaccccgcagggcggagtgatttccccgttattggccaacctgtatctgcatgaagcgtttgatatgtggatgaaagagcatctgcctaatgtgcagttcgaacgttatgctgatgacgtgattgcacattgtgcgaccgaaaaacaggcgcaagatgtgttggaagaaatccgcgagcggctgttgttgtacaagttagaactccatcccgagaaaacgaaaattatctatgttggctcaggtaaagatcccgagaataaaccgccgcgtaagtttacctttctgggctacgaattcaagccacgtggttatgtgaaagataaaatttggcacatgacctttaccccttcgattggagcgaaagctctcaaggccatccagattaaaatggacgaatggtcgctgcatagtcgtacattctctaaactgtcggacatctcacaggaaaaaagcgcgatcattcgtggttggatcgaatattatggtcattatcgccgcagcgaactgtacaagctggcaatccgcattgattggaaactggtccgttggctcaaacgtaagcacaaaagtctgcgtagcactgataaagcctggcaggccttacgttcagtcaaaaaaggatggccgaaactttttccccactggcacatgattccgaccccgccaactcgcgcagtc

SEQ ID NO: 223 - DNA, 1227 bp, synthetic construct
  source 1..1227: mol_type = other DNA
atgattgattattacgaaaccaagcagcaccccgtaaccaaaaaaatggtcttggacgcgtacaagaaagtacgtgagaacaaaggttcggcgggcatggatgaacagaccctcgaggacttcaaacttaaggcaagcacgaacctgtatcaaatttggaaccgcatgacttcaggatcgtactatccgaatgccatcaaacaggttctgattccgaaaaagagcggtggtacacgtagcctgggcgtgcccaccgtgagcgatcgtatcgcgcagcaggtggtgaaaagttatcttgaagccaaagttgaagcatccttccatcaagattcctatgggtatcgccctaataaaagtgctcatcaggccttggatgtcgctaaaggccgctgctcttactatagctgggtactggacatcgatatcaaaggatttttcgataacatcgatcacgaattaatgctcaaagcattgaagcgctatacgcaggaaaaatggattctgaactacgtcgaacgttggttgaaggtcggcgtctttaatggcaatgaggtggaatcccgcgaaaaaggcactccgcagggcggcgtgattagtccattactggccaatatttttcttcactttgcttttgacatgtggatgctgaaaatctacccgcacgttccattcgaacgttattgcgacgatgtaattattcattgttcaggtaaggaacaggcgctgctgatgaaaatggcgattgcgaaacgcatgaaagagtgtaagctggagctcaacgagcagaaaacgcaaatcgtgtactgtcgcaaccagattcataaagagaagtacgaacaggtgtcgtttgacttcctggggtacacatttcggcctcgttattgcccgactaaaaaaggtctgtccctgctcttcaccccgtgcatgtctacgcattcaaaaaacgatgtgcgggaaaaaatccgcaaagttatcaatcgttcttttaaaggaagtgtacaacaacttgcacagatgctgaaccaaaaagtgcgtggttggttccagtactactgtcagtataataagtataccacggttgggctgtggtattggctgaacgcgaaagttattaattgggtcatggaaaatcggcattttggtatgcgccgtgccgttcgttggttaaaaaccatctattcgaccaacccagatatgtttattcactggcaattaagccatccgtgg

SEQ ID NO: 224 - DNA, 1251 bp, synthetic construct
  source 1..1251: mol_type = other DNA
atgatctttaaagaacagactaaaagtgttccaatcacgaaagaaatggtctgggaatcgtataagaaagtaaaaagtaatggtggtagcgctggcattgatcaacagagcttaagtgaatttgatcgtgttcggtccaaagaactgtacaaactgtggaaccgcctggcatccggtagctatttcgccccggcaattaaacgtgttaccatcccgaaagcagggggaaaaacacgtccgctgggcatccccaccgtgtctgatcgcattgcacagcaggtggtaaaaacgtatcttgaacctcgtctggaatcggtgtttgtagacaattcttatggatatcgtccgaacaagaacgcgcacaccgccattcaatcagtgcagcaaaacgttcgtcgctacagctgggtgattgaccttgacatccaggaattcttcgagaacgtgaatcacgagttgctgctgaaggctttagagcgccacgtcagcgagaaatgggttttactgtacattaaacggtggctcgaggctcctgtcattttggaagatggtgcggttaaagtcagcacgggcaaaggcactccgcagggtggggtgatttcaccgctgctcgccaatctgtacatgcattattgcgttgataagtggctggaaaaatttcatccaagtgtgattatggtgcgctacgccgatgatctgattattcattgctcgtcttaccaggaagcggttcgtaccctgacagaccttaaagatcgcttggaaaaatgtggtttgcgtgcgcatccagagaaaaccaaaattgtctattgcaaaaaggaaggccggaaccttaatgactacccggtccagtttgattttttaggtttttcttttcaaccgatgcgcaatcgtttacgcaatggcggctcgtttctgcaattcgattgtaaaatgagccgtaaaagtaaagtccgcatcaatggggaactccgcaagctcaacttccataataagacccagcgcggcatccaggacctggcgatcctgctgaacccgaaaattcggggatgggtgcaatactatggcaaaatctcacgtcgtagcttgaaacccgtgttctattatctgcaccatcgtctcatccgctggatcctgaacaaatataagtccttcaaaggttccaaagtaaaggcggtgaagtggctgcgtcaggtaacggtgtcatatcctaacctgttttaccactgggagttagggtataaacttgtt

SEQ ID NO: 225 - DNA, 1242 bp, synthetic construct
  source 1..1242: mol_type = other DNA
atgaccggcaagagttatgatattccgaaaactctggtgtgggaagcgtggcttcgcgttaaagcaaaccgcggcgccgcagggattgatgcggagacaattgaacgctttgaaactaaactggcggccaatctttatgaattatggaaccgtatgtctgccggcagctactttccgccgccggtaaaagcagtgccaatccctaaaaaatcaggcggggtgcgtgtgctgggggtaccgaccgtgagcgatcgcatcgctcagaccgcggtcaaaatgtggctggagccacgtctggatcctctctttcatgaagatagttacggctatcgtccgggcaagagcgctttagaagctattgccgttacgcgccgtcgttgttgggaccgcgattgggtcgtggaatttgatatcaaaggactgttcgacaatcttgatcatggactgctcatgaaagcgttgcgcaaacactgcgaagagccctggatcctgctgtatgtggaacggtggctgacggcaccgatgcagtcggccgatggtcgtgttcagacgcgtttcaaaggcaccccacaaggcggtgttgtatcgcccctcttggccaatctgtttttgcattatgcgttcgacacatgggttgcgcgccacctgccgggtgttcggtttgcgcggtatgcggatgatgctgtgttacattgcaaaagccgtcgccaagccgagtatgtgctggaccgtatccgtgagcgctttcctgcttgtaaactggagttgcatccgggtaagactcgtattgtatattgcaaagacgtcaaccgtacggaagataatcccgatattcagttcaccttcttagggtacacctttcgccctcgtcgcgccgccgataagtacggtcgcatctacgttaacttctccccagcagtctcgcgtgacgccctgaaagcgatgcgccagacgattcgcggttggcgggtgcaattgaaaaatgacaaaagtctggcggacctttccgcgatgttcggcccgattctgcgtggctggcgtcagtactacggtcgctttcacggctctgcattagaatccgtctggcgtcgtatgaaccgtgcactcatcggatggctgatgcgtaaacataagaaattagcccgccgtaagctgcgcgcggcagaaaccctggaacgcatggcgaaacggcagccgcgtgcttttgtccactggagcatgggttatctttcatctgtaggt

SEQ ID NO: 226 - DNA, 1521 bp, synthetic construct
  source 1..1521: mol_type = other DNA
atggctagcgcatggagtcatcctcaattcgaaaaatccggaatgatgcatggtttagagaaatcggatcttgcagtggtggccatgaagcccgcgaataacgcaggttcaccagctgcggagtgggttgaacctcgcgccggtacgaatggtaacgcagatccgccgcgcacccgtcgtacccagagccgtgactctgtttcacagggattagagcgcgtgcgccaagcggcaatgcaacggaaacgccaagcctttaccgcgctcttacaccacgtaaacgttgacgcactgcgggaagcatttttggccctgaaacgtcgcgcagccccgggcgtcgacggaatgacatggcaggattatgaaagcggcctggaagaacatcttcaagatctgcacgcccgtgtacatcgcggtacgtatcgcgctctccctgtacgccgtcggttcattccgaaaccggatggtcgtcagcgtccgttaggtattgcggccctcgaggataaaattattcagcgcgcagttgtgacagtcttgaacgccatctacgaagaagactttctggggttcagttatggcttccgtccggggcgtggccagcacgacgctctggacgccctgtgcgttgcgatcaaaggtaaacgggttaactgggttctggatgctgatattaaaggcttcttcgatgcggtggatcatagctggctgctgcgttttgtgcgccatcgcgtgggggatgaacggattacccggctggtggggaagtggctgatggcgggcgttctcgaggatggccattggagcgcgagtgaccagggcactccacaaggcgctgtcatctcgccactgctggcgaatgtagaccttcattatgtatttgatctgtgggctcagcaatggcgtcggcgcgaagtgaagggtgatatgattatcgtgcgttacgcagatgaccttgtggtcggcttcgaacacgaagccgaggcccgccgtttttgggatgccatgcgtgtccgtctggaacaattcagcctggaattgcatggtgagaaaactcgcctgttagaatttgggcgctatgcgatcgaacgtcgtcagcgctccggacagggaaaaccccagacttttaatttcctgggctttaccttcatctgtggtcgtagtcgccgtggcgcgtttttgctgcgtcgccatacccggcgtgaccgcatgcgcgcggcgttgcgtgaacttaaagacgagatgcgtcggcgccgccatgattcgctcacggatcagggtcgttggctgcgttccgtcgtcgcgggctactttgcttaccacgcagtgccaacgaatgcgcacgcgattggcgcatatcgtcatcatgtgatcgatctttggcgtcgttccttgcgccgccgttctcagaaagaccgtatgacccgcgctcgtatggatcgcctggcagccgaatggctgccgccgccgcacgtcttacatccctggccggaagatcgttttgccgttaagcaccctcgctga

SEQ ID NO: 227 - DNA, 1590 bp, synthetic construct
  source 1..1590: mol_type = other DNA
atggctagcgcatggagtcatcctcaattcgaaaaatccggaatgcagaccgcactctgggagtcggaccagcccattgtgcctaaaaaacgtgggaacgcacgtggcggtaaagagctggcgggagctcggtggacaggcggtgaaccgccgccaattccacgtgacggtcacggcgtaagtccgaaacttcggtcaattaccttgcgtgcgcgtgaagatccgacgtgcaagttcactagtctcgcgcatcttctgaccgcagattttctgacggaatgtttccgtgaactgaaaaagaacaaagcgccgggcattgatggtgttacggtgcgtgaatatgaagctaaacttgatgaaaacatttccgacctggttgcccgtcttaaagctaagcaataccgtccgcagccagtgaaacgtgtttatatccccaaacctaatggtgaacgccgcccgctgggcatccccgctattgaggataaaattgttcaaatggcgctgaaaaagattttggaagccatcttcgaagtggatttttgtgaagtgagctatggcttccgtccaaatcggtcatgccacgatgcactggatatggtcgacacaacgattatgacgcagcctgtcaattacgtcgttgacatggatattgcaaagttctttgatactgtagatcatgaatgtctcatggaatgcttacgccagcgtattgccgacccgagcctgttacgtattatcgcgcgttttttgaaatcgggcgtgatggaagacggcgtatttcaggagattgatcgtggtacgccgcaaggtggtatcctgtcccctatgctggccaatatctatctgcattacgcactggatctttggttcgagcaagaagtgaaaaaacaattatccggctttgcccagttggttcgctatgcggacgattttgtcgtctgctttcaataccgcagcgatgccgaggcctttggcgcggctctccgcgaacgtctggccaagtttgagttaaaaatcagtgaagagaaaagccgcatcattgcctttggccgtagcgcgtgccaacaggcgcgcaaacagggtaaaaaatgtgcaacatttgatttcctgggctttactctgtattgcgacaaagaccgcaacgggaactttaaagtggggcgtaagaccgcgtcaaaaaaattccggcagaaaaccaaagaaatgaaccagtggctgaaaggaacccgcaaccgcgttaaactgggcttgtggtggccgctgctgggtcgtaagctggtcggtcactatcagtactatggcatctctggaaatattaaagggctgcagtcttattaccatcacaccgtacggttggcgttcaagtggatcaaccgccgtagccagaaaaaatcctacaactggtcgcagttcaataagttcctcgcccgcaatccgttaccgaaaccgaagatctatcacttttacgctttatcgaaacgccgcggatgcgcgccggaagaaccagatgagggtaaactgcatgtgcgcttttgtgaaggggcccatagtcatcttggcgcatctacccctacccgcgggcgtctgtga

SEQ ID NO: 228 - DNA, 1389 bp, synthetic construct
  source 1..1389: mol_type = other DNA
atggctagcgcatggagtcatcctcaattcgaaaaatccggaatgcagcctgtgaaagaaacctctactggccatgtcggcagcgggaagtgctggcaaacgagtctgcgtggaatcgcaaaaaaggcaactgagaacaaaacacaccaatttggtaatctgtaccaactgctcaacaaagaaagcctgcgggaagcgttttatgatctcaagaagaaagcggccgccggcgtggacaaaatcaccgccgaagagtacgccaaagagttagaaagcaacctcggcgaacttgaagaacaactgaaatcaaaacagtaccgggcaaaacttgtacgtcgtgtctatattgataaaggaaacggtaaaaaacgtccactgggtattccggctgtgtccgataaaattacacagcgtgttgctgcgcgcatgctggaagcgatctatgaaacggagttttccgcgcattcatacgggtatcgtccccacacgggggcccagaaagcagtcaaggatcttaccaaagaattgatttgcggcaagtacggctacgttgtggaagccgatattcgttcgttttttgatgccattgaccatgactggttgattcgcatgttggaagtacgtattgcagacaaagcgttcttacgtttgatcaaaaaatggttaaaggcgggcgtacttgacaccgatggtatggtgaaacatccggttaccggttgtccacagggtggcgtaatttcgccgattctggcgaatatctatcttcactatgcgttagacctgtggtttgagaagcgtgtgcagcagagctgcgagggtatgacctatatctgtcgttatgccgatgattttgtttgtgccttccagttcaaacaagaagctgtcaagttttacaaagaattaggcgaacgcctggagaagttcgggctcgaactggcacaggaaaaaacgaatatcatcattttcagccgtttccggcaagaggataaaactaagtttgagtttctgggattcgaatttcggtggggtgtgtcgcgtaaaggcaaagcgattatcaaacgccgtaccgctccgggcaaactgcgcaaaagtattattgcttttacggaatggtgtaaaaaaatgcggtctaaacgcttacgcaaactgttcccgaaactgatcgctaaactccgcggctataccaattattacggtttgattggtaattttcgctccctgagcaagttctatgaacatgttaaacgcatcttctacaaatggctgaaccgccgttcacagcgccgcagttttaacctggcggagtttgatgcatgctgggaacgttatggggtgccgaaacctcgcatcgttgaatctgacctggtccagctgcactttgatttctga

SEQ ID NO: 229 - DNA, 1362 bp, synthetic construct
  source 1..1362: mol_type = other DNA
atggctagcgcatggagtcatcctcaattcgaaaaatccggaatgtcaggaagcccaaatcttggcagcatctcgacacgtctgcgccgtatcgcacagctggcgcgcgaagacccagaacgctcttttatgagcttagctcattatatcgatgaatactggttacaggaagcttactcgcgcactcggaaggatggggccaccggcgtggatggaacgaccggcaagcagtatggtgaacagctgggtgacaaccttcgtagcctcttagatcgctttaaaagtggccagtatcaagcgccgccggtcaaacgggtacacatccccaaaggcaccggtgatcaaacccgtccgattggtatcccgacttttgaggacaaagtcctgcaacgcgcggtggccatgctgctggaagccatctatgaagaagactttttggcttgtagttatggcttccgtcctggtcgtagcgcacatgaggcgctgcgtgatctttggcgggaactgatgggtatgggtggtggctgggtattggaagttgatattcggagtttttttgacgagctcgatcatgggcacctgcgtggcttcctggatcgccgcgtgcgcgacggggtcattcgtcgtgcaattggaaagtggttgcaagcgggcgttctggaagagggccacatgcgccatcctgtaacgggcaccccgcaaggcggcgtgatttccccgctgctggcgaatatctacctgcacgaagttgttgaccgttggtttgaagaagaggttaaaccacgtctgggtggtcgtgccgtcctgattcgctatgccgatgatcttgtaatcgctttagccgaggagaaagatgcgcgtcgtgtcgaagaagttctgccgaaacgcctggcacgtttcggcttgcagctgcatcctgacaaaacacggcttgtgcgttttcaggcaccccgtgatgaggaaaaaccgccacgttccgaaggtccgggagcttttaccttcttgggtttcacgcattattgggggaaaagtcgtaaagggaactgggtggtgaaacgcaaaacggcggccagccgttttactcgctcactctcacgcgtgcgtcagtggtgccgccgttgccggcatgagcccgtggcctggcagcagcgtcagttatctcgctctttacgtggccactacgcgtactacggtattacggggaattttcgctcgctcaccaacttccatcggcaggttacccgtgaatggcgcaagtggttgaaccgccgctcccaaaaagcacgtatgatttgggaacgcttcaatcgtctgctggtcgaatatccgctcgagcggccgcgcattttccacgcgatttga

SEQ ID NO: 230 - DNA, 1518 bp, synthetic construct
  source 1..1518: mol_type = other DNA
atggctagcgcatggagtcatcctcaattcgaaaaatccggaatgatgcatggtgacggcaagagtgatcgtccggtagtgccgggtaaaccgccgaacaaagatgggcgccgtggtccgcgtgatcatggtgtgccatacaccggcacgaaagcggaagcgccagatactgctaaaggcacgcctacggaagcaaaagcacgtgggggtccaacggcggaaggtgtagcacgccgtgatcgcaagctgcgtttcaccgccttactccatcacgtgtacgaccctgagatgttacgcgaggagtatttttgcctggaacgtgaagccgcgccgggagttgatcgtgtaacctggcgtcagtatggagaagccctggaagacaatctgcatgaccttagcgcacgtctgaaacgtggcacttatcgggcgaaacccgttcgtcgcgtctttatcccaaaagccgatggacgtcctcgtccgctgggggttaccgctctggaagacaaactggtgcagcgtgcgaccgtcgaagtgctgaacgccatctatgagactgactttcttggcttcagttacgggtttcgtcccggccgctctcagcacgacgcattggacgccctgtacactggcctgctgacaaagaaagtgaattgggtcttggaccttgacattcggggttttttcgaagcaattgatcatggctggttagtgaagtttgtcgagcaccgtattgccgatcgtcgcgtggtccgcctcattcagaaatggctcaacgcgggcgtgttagaggatggcaaacggacccgtagcgaacaagggacaccgcaaggtggttccgcatcccctttactggccaatgtatacctgcactctgtgtttgatctttgggtacagcgctggcgtcgcacgcaggcgcggggcgatgttgtagttgtgcgttatgccgacgatgcggttgtcggtttccagaatgagtcggatgcgaaacgctttcgtgcagaattggctgagcgcctgtcagaatttgctctcgaactgcacccggataaaacccgcctgatcgaattcggcccttatgcggcttcgaatcgcaaacgccgcggccagggcaagcccgaaacatttgatttcctgggcttcacgcacatttgcgggaaaaaacgcagcaacggacgctttaccgtcttacgtcagaccatccgcaaacgccttcaagcgaagctgaaacaagttaaaacgggattgcgtcggcgtctgcatgatccagttccggaagttggtcggtggctgcgttcagtggtgggcggtcatgtgcgttactatggcgtccccatgaacggtccggctctgcatctttttcgcttccaggttgggcgcttgtggtatcgtagtctgcgccgccgtagccaaaaagcgcgtttaacctgggaacgtatgcgccggctcatcgatcgctggctgccgccggcccgcgtctgtcatccgtatccgctgcgccgtttgggtgtgattacctga

SEQ ID NO: 231 - DNA, 1476 bp, synthetic construct
  source 1..1476: mol_type = other DNA
atgatgcatggtttagagaaatcggatcttgcagtggtggccatgaagcccgcgaataacgcaggttcaccagctgcggagtgggttgaacctcgcgccggtacgaatggtaacgcagatccgccgcgcacccgtcgtacccagagccgtgactctgtttcacagggattagagcgcgtgcgccaagcggcaatgcaacggaaacgccaagcctttaccgcgctcttacaccacgtaaacgttgacgcactgcgggaagcatttttggccctgaaacgtcgcgcagccccgggcgtcgacggaatgacatggcaggattatgaaagcggcctggaagaacatcttcaagatctgcacgcccgtgtacatcgcggtacgtatcgcgctctccctgtacgccgtcggttcattccgaaaccggatggtcgtcagcgtccgttaggtattgcggccctcgaggataaaattattcagcgcgcagttgtgacagtcttgaacgccatctacgaagaagactttctggggttcagttatggcttccgtccggggcgtggccagcacgacgctctggacgccctgtgcgttgcgatcaaaggtaaacgggttaactgggttctggatgctgatattaaaggcttcttcgatgcggtggatcatagctggctgctgcgttttgtgcgccatcgcgtgggggatgaacggattacccggctggtggggaagtggctgatggcgggcgttctcgaggatggccattggagcgcgagtgaccagggcactccacaaggcgctgtcatctcgccactgctggcgaatgtagaccttcattatgtatttgatctgtgggctcagcaatggcgtcggcgcgaagtgaagggtgatatgattatcgtgcgttacgcagatgaccttgtggtcggcttcgaacacgaagccgaggcccgccgtttttgggatgccatgcgtgtccgtctggaacaattcagcctggaattgcatggtgagaaaactcgcctgttagaatttgggcgctatgcgatcgaacgtcgtcagcgctccggacagggaaaaccccagacttttaatttcctgggctttaccttcatctgtggtcgtagtcgccgtggcgcgtttttgctgcgtcgccatacccggcgtgaccgcatgcgcgcggcgttgcgtgaacttaaagacgagatgcgtcggcgccgccatgattcgctcacggatcagggtcgttggctgcgttccgtcgtcgcgggctactttgcttaccacgcagtgccaacgaatgcgcacgcgattggcgcatatcgtcatcatgtgatcgatctttggcgtcgttccttgcgccgccgttctcagaaagaccgtatgacccgcgctcgtatggatcgcctggcagccgaatggctgccgccgccgcacgtcttacatccctggccggaagatcgttttgccgttaagcaccctcgc

SEQ ID NO: 232 - DNA, 1545 bp, synthetic construct
  source 1..1545: mol_type = other DNA
atgcagaccgcactctgggagtcggaccagcccattgtgcctaaaaaacgtgggaacgcacgtggcggtaaagagctggcgggagctcggtggacaggcggtgaaccgccgccaattccacgtgacggtcacggcgtaagtccgaaacttcggtcaattaccttgcgtgcgcgtgaagatccgacgtgcaagttcactagtctcgcgcatcttctgaccgcagattttctgacggaatgtttccgtgaactgaaaaagaacaaagcgccgggcattgatggtgttacggtgcgtgaatatgaagctaaacttgatgaaaacatttccgacctggttgcccgtcttaaagctaagcaataccgtccgcagccagtgaaacgtgtttatatccccaaacctaatggtgaacgccgcccgctgggcatccccgctattgaggataaaattgttcaaatggcgctgaaaaagattttggaagccatcttcgaagtggatttttgtgaagtgagctatggcttccgtccaaatcggtcatgccacgatgcactggatatggtcgacacaacgattatgacgcagcctgtcaattacgtcgttgacatggatattgcaaagttctttgatactgtagatcatgaatgtctcatggaatgcttacgccagcgtattgccgacccgagcctgttacgtattatcgcgcgttttttgaaatcgggcgtgatggaagacggcgtatttcaggagattgatcgtggtacgccgcaaggtggtatcctgtcccctatgctggccaatatctatctgcattacgcactggatctttggttcgagcaagaagtgaaaaaacaattatccggctttgcccagttggttcgctatgcggacgattttgtcgtctgctttcaataccgcagcgatgccgaggcctttggcgcggctctccgcgaacgtctggccaagtttgagttaaaaatcagtgaagagaaaagccgcatcattgcctttggccgtagcgcgtgccaacaggcgcgcaaacagggtaaaaaatgtgcaacatttgatttcctgggctttactctgtattgcgacaaagaccgcaacgggaactttaaagtggggcgtaagaccgcgtcaaaaaaattccggcagaaaaccaaagaaatgaaccagtggctgaaaggaacccgcaaccgcgttaaactgggcttgtggtggccgctgctgggtcgtaagctggtcggtcactatcagtactatggcatctctggaaatattaaagggctgcagtcttattaccatcacaccgtacggttggcgttcaagtggatcaaccgccgtagccagaaaaaatcctacaactggtcgcagttcaataagttcctcgcccgcaatccgttaccgaaaccgaagatctatcacttttacgctttatcgaaacgccgcggatgcgcgccggaagaaccagatgagggtaaactgcatgtgcgcttttgtgaaggggcccatagtcatcttggcgcatctacccctacccgcgggcgtctg

SEQ ID NO: 233 - DNA, 1344 bp, synthetic construct
  source 1..1344: mol_type = other DNA
atgcagcctgtgaaagaaacctctactggccatgtcggcagcgggaagtgctggcaaacgagtctgcgtggaatcgcaaaaaaggcaactgagaacaaaacacaccaatttggtaatctgtaccaactgctcaacaaagaaagcctgcgggaagcgttttatgatctcaagaagaaagcggccgccggcgtggacaaaatcaccgccgaagagtacgccaaagagttagaaagcaacctcggcgaacttgaagaacaactgaaatcaaaacagtaccgggcaaaacttgtacgtcgtgtctatattgataaaggaaacggtaaaaaacgtccactgggtattccggctgtgtccgataaaattacacagcgtgttgctgcgcgcatgctggaagcgatctatgaaacggagttttccgcgcattcatacgggtatcgtccccacacgggggcccagaaagcagtcaaggatcttaccaaagaattgatttgcggcaagtacggctacgttgtggaagccgatattcgttcgttttttgatgccattgaccatgactggttgattcgcatgttggaagtacgtattgcagacaaagcgttcttacgtttgatcaaaaaatggttaaaggcgggcgtacttgacaccgatggtatggtgaaacatccggttaccggttgtccacagggtggcgtaatttcgccgattctggcgaatatctatcttcactatgcgttagacctgtggtttgagaagcgtgtgcagcagagctgcgagggtatgacctatatctgtcgttatgccgatgattttgtttgtgccttccagttcaaacaagaagctgtcaagttttacaaagaattaggcgaacgcctggagaagttcgggctcgaactggcacaggaaaaaacgaatatcatcattttcagccgtttccggcaagaggataaaactaagtttgagtttctgggattcgaatttcggtggggtgtgtcgcgtaaaggcaaagcgattatcaaacgccgtaccgctccgggcaaactgcgcaaaagtattattgcttttacggaatggtgtaaaaaaatgcggtctaaacgcttacgcaaactgttcccgaaactgatcgctaaactccgcggctataccaattattacggtttgattggtaattttcgctccctgagcaagttctatgaacatgttaaacgcatcttctacaaatggctgaaccgccgttcacagcgccgcagttttaacctggcggagtttgatgcatgctgggaacgttatggggtgccgaaacctcgcatcgttgaatctgacctggtccagctgcactttgatttc

SEQ ID NO: 234 - DNA, 1317 bp, synthetic construct
  source 1..1317: mol_type = other DNA
atgtcaggaagcccaaatcttggcagcatctcgacacgtctgcgccgtatcgcacagctggcgcgcgaagacccagaacgctcttttatgagcttagctcattatatcgatgaatactggttacaggaagcttactcgcgcactcggaaggatggggccaccggcgtggatggaacgaccggcaagcagtatggtgaacagctgggtgacaaccttcgtagcctcttagatcgctttaaaagtggccagtatcaagcgccgccggtcaaacgggtacacatccccaaaggcaccggtgatcaaacccgtccgattggtatcccgacttttgaggacaaagtcctgcaacgcgcggtggccatgctgctggaagccatctatgaagaagactttttggcttgtagttatggcttccgtcctggtcgtagcgcacatgaggcgctgcgtgatctttggcgggaactgatgggtatgggtggtggctgggtattggaagttgatattcggagtttttttgacgagctcgatcatgggcacctgcgtggcttcctggatcgccgcgtgcgcgacggggtcattcgtcgtgcaattggaaagtggttgcaagcgggcgttctggaagagggccacatgcgccatcctgtaacgggcaccccgcaaggcggcgtgatttccccgctgctggcgaatatctacctgcacgaagttgttgaccgttggtttgaagaagaggttaaaccacgtctgggtggtcgtgccgtcctgattcgctatgccgatgatcttgtaatcgctttagccgaggagaaagatgcgcgtcgtgtcgaagaagttctgccgaaacgcctggcacgtttcggcttgcagctgcatcctgacaaaacacggcttgtgcgttttcaggcaccccgtgatgaggaaaaaccgccacgttccgaaggtccgggagcttttaccttcttgggtttcacgcattattgggggaaaagtcgtaaagggaactgggtggtgaaacgcaaaacggcggccagccgttttactcgctcactctcacgcgtgcgtcagtggtgccgccgttgccggcatgagcccgtggcctggcagcagcgtcagttatctcgctctttacgtggccactacgcgtactacggtattacggggaattttcgctcgctcaccaacttccatcggcaggttacccgtgaatggcgcaagtggttgaaccgccgctcccaaaaagcacgtatgatttgggaacgcttcaatcgtctgctggtcgaatatccgctcgagcggccgcgcattttccacgcgatt

SEQ ID NO: 235 - DNA, 1473 bp, synthetic construct
  source 1..1473: mol_type = other DNA
atgatgcatggtgacggcaagagtgatcgtccggtagtgccgggtaaaccgccgaacaaagatgggcgccgtggtccgcgtgatcatggtgtgccatacaccggcacgaaagcggaagcgccagatactgctaaaggcacgcctacggaagcaaaagcacgtgggggtccaacggcggaaggtgtagcacgccgtgatcgcaagctgcgtttcaccgccttactccatcacgtgtacgaccctgagatgttacgcgaggagtatttttgcctggaacgtgaagccgcgccgggagttgatcgtgtaacctggcgtcagtatggagaagccctggaagacaatctgcatgaccttagcgcacgtctgaaacgtggcacttatcgggcgaaacccgttcgtcgcgtctttatcccaaaagccgatggacgtcctcgtccgctgggggttaccgctctggaagacaaactggtgcagcgtgcgaccgtcgaagtgctgaacgccatctatgagactgactttcttggcttcagttacgggtttcgtcccggccgctctcagcacgacgcattggacgccctgtacactggcctgctgacaaagaaagtgaattgggtcttggaccttgacattcggggttttttcgaagcaattgatcatggctggttagtgaagtttgtcgagcaccgtattgccgatcgtcgcgtggtccgcctcattcagaaatggctcaacgcgggcgtgttagaggatggcaaacggacccgtagcgaacaagggacaccgcaaggtggttccgcatcccctttactggccaatgtatacctgcactctgtgtttgatctttgggtacagcgctggcgtcgcacgcaggcgcggggcgatgttgtagttgtgcgttatgccgacgatgcggttgtcggtttccagaatgagtcggatgcgaaacgctttcgtgcagaattggctgagcgcctgtcagaatttgctctcgaactgcacccggataaaacccgcctgatcgaattcggcccttatgcggcttcgaatcgcaaacgccgcggccagggcaagcccgaaacatttgatttcctgggcttcacgcacatttgcgggaaaaaacgcagcaacggacgctttaccgtcttacgtcagaccatccgcaaacgccttcaagcgaagctgaaacaagttaaaacgggattgcgtcggcgtctgcatgatccagttccggaagttggtcggtggctgcgttcagtggtgggcggtcatgtgcgttactatggcgtccccatgaacggtccggctctgcatctttttcgcttccaggttgggcgcttgtggtatcgtagtctgcgccgccgtagccaaaaagcgcgtttaacctgggaacgtatgcgccggctcatcgatcgctggctgccgccggcccgcgtctgtcatccgtatccgctgcgccgtttgggtgtgattacc

SEQ ID NO: 236 - DNA, 1368 bp, synthetic construct
  source 1..1368: mol_type = other DNA
atggctagcgcatggagtcatcctcaattcgaaaaatccggaatgaaccttagcaccccagaatccgttcagaaacttcaaacagcgctgcatacgaaagcgaaagaaagtccggattaccgcttttattgtctgtatgataaggtttatcgtgccgacgttttagcccacgcgtatcactgctgccgtgcaaatgggggtgccgcgggcgtggacggacagacttttgaatctatcgagtcagggggcttggacacctggctgggcgaattagccaaagaactgcgtgataaaaaataccgcccggaagctgtccgccgcgtttacattcctaagccgaatggctctaagcgtccgttgggtattcccacgattcgcgaccgggtggctcagatggcggcggtgttggtgttagagccgatcttcgaagctgaccttgaacccgaacagtatgcctaccgtcgtgatcgttcggcattggacgccgtgaaaaaggtgcacagcctgctgaacaccggccataaagaggtgattgatgcagatctgtccgggtacttcgacagcattccacatgctgaactgatgaaaagtctcgcgcgccggatcagcgaccgtcacgttctgcatctgattaagatgtggttggaagggccggtggaagaatccgatgaacgtgggaataaacaccgcacaactcgcaacaaagatgagggtcgtggcacccctcagggcgcgccgatctctcccttactgtcaaatctttatatgcgtcgttttgtgttaggttggaaagcgctgggtcactcgaaacgcctgcaggcgcatattgtgaactacgccgatgatttcgtgatctgttgtcggggaacagcgcaaagtgctatgcagacgatgacggatatgatggtaaaacttcgtctgactgttaatgaggcgaagacccatgtttgccgggtcccagatgagagctttgattttctgggttacaccatcggacgttgttggtcgactcgtaccggccaaccatacatcggcacgcgcccgtccaaaaaacgcatcgcgcgtgtctgcgaaaccattagtgagttaacgagccgtcgttggttgctgctggatgtcgacgagcgcgtccgccgtctcaaccgtaccctcattggttgggcaaactatttttgcctgggtccggtatcaaaagcataccgcgcagtagatgcccatgcacgttatcgtctgcgccagtggctgcgcgcgaaacataaagtacgtggcgccggcacggcccaatatccggacgaatatctgtatgcaaccctcggtctggtcgaactcgcccgccgcacccgggatttcccttgggctaaagtttga

SEQ ID NO: 237 - DNA, 1353 bp, synthetic construct
  source 1..1353: mol_type = other DNA
atggctagcgcatggagtcatcctcaattcgaaaaatccggaatgatcaaagcttccgtgggcctgcaggatcttcgccgccgcatctatgtcaaagccaaagctgaaccatcctggcgtttttggggcctctacgtgcatgtgtgtaaaatggaagccttattcttagcatacgaaatggcgaaaaagaacgacggtgcgccgggtattgacggggttacgtttgcggcaattgaagcccagggagtagcggcttttttggaacagattcaagatgaactgatcgggcgcacctacgtcccactgcccgcacggaaacaagaaattcctaaagatgggggcaaagtccgtattctgtccatccctgccatccgtgatcgcgtagtgcaaggtgccttgaaattgattcttgagcccgttttcgaagcggatttccaggcaggatcgttcggttatcgcccaaaacgtgcagcgcgtgaagcggtaagtcgtgtggcacaggctattgcgcagtataagactcgcgtgattgacctcgatctgcgcgcctatttcgataccgtgcgccacgagttattgctcaaaaaagtggcgcagcggatcaacgacaatgacgttatgcacctgttaaaagtgatgctcaaagcctcaggcaaacagggtgttccgcaaggcggtgtcatcagtccgttgctgtcaaatctttatctgaatgaagttgatcgcatgcttgagcgcgccaaagttgtaacccggagcggtcagtatacgtatgtcgaatatgcgcgttttgctgatgatatggtcattctggtggatgcgcatcgtcgtcacgattggctgatgaaagctgttgagaaacgtctgcgcgaggaattcgccaagctgcaggttgaaatcaatgaagagaagtctagcatcgttgacctgagtcgcggcgaatcttttggctttctgggctttgattttcgtcgtacccgtagtctgaaaggtgtatggcgtccgtactacgccccgaaactcaaaaagcgcacagcactgctgcaaaagctgaaagaggtctttcgctcccatcaatctcagccggtcgatcgcattgttcatctgattaacccgattctgcgcggctgggtgaattatttcgcaattgggaactcgagccagtgcttcaactacatccaggactgggtggagaagaagatccgtcgtcatcttatgcgttcacgcaaacggcgcggctttggctggcaacggtggtcgcgtcagtggttatacggcggattaggtctgtttgacggttatcgtgtgtcgcgtgcgtggagcaaagccactagcgcggaacaggtaagctga

SEQ ID NO: 238 - DNA, 1332 bp, synthetic construct
  source 1..1332: mol_type = other DNA
atggctagcgcatggagtcatcctcaattcgaaaaatccggaatgcaggaattaccgaacatcgatcgcatccgggaatttcagcgcaaacttcatgaaaaagccaaagcggatcctaagtatcgtttctattcactgtatgacaaagcatatcggatggatatcctcgaggaagcctatcgcaaagcgaaagccaatggcggtacttctggcgttgacggcgaaacgttcgatgatattgaagccaaaggtgtggctgaatacctgacggttttgcaaaaagaattaaaggaagagcaatacaacccgaaaccggtccgccgggcgtatattcccaaaccaaatggtaaaaaacgtcctctggggattcctactgtccgtgaccggatcgtgcagggcgcatttctgttgattttggaaccgatcttcgaagctgacttttgcgatagtagttttggatttcgtccagagaaaagcgctcaggatgcaattcgcgaaatctacaaatatcttaactggggttgcgaaaaaatctacgatgtggatctggaacagtattttgataccgtggagcactggaaattgatgaagctgctggcactgcgtatttctgatggaaaggtcttacatgttatcaaacaatggctcagctgtggctatgtagaagatggtcagcatcgtcaatcaaaacgcggcacaccccagggtggcgtgatttcgccgctcctggccaatgtgtatcttaatccggttgaccgcgcgtttgaacgcaatggcattggaacgatcaaacaaggttccattcatcttgttcgttatgcggatgacatggtgattctggcgcagaagaaccttgaaaaggggattacgctgttagactcctacgtggacaaactgggcttgcgtctgaacaaggagaaaacccgtcgcctggacctgccgactgataaaaaagtcaagtttctcgggttccagttccatcgggtcaccaaccgcaaaacacagaaacgcttaatcctggtatcgccgagcccaaaaagtcttaaacgctgtcgtgagaaagtgaagaccctgatcaaccactcgaacccgatggctgtacgcgagcaaattgaacgtctgaataagtacctctccggttggaccaactactttcgtctggggaacagcgcccacgcactgcaccaggtccgttactatgttaatcagcgtgtacgtcgtttaatccagcgccataaaggtcgtgagggctacggctggaaaaatattaccagcgcggatctgtacggccgcttgggtctgttctgcgattataaagttcgttggctgtga

SEQ ID NO: 239 - DNA, 1440 bp, synthetic construct
  source 1..1440: mol_type = other DNA
atggctagcgcatggagtcatcctcaattcgaaaaatccggaatgagcaaccgtttggatcaaccggcgaatgtgaacgagtcagatcacgaacgcacccgcttacgtgctcgtgacgttgttcgtgacgagggtatttcgtctcttcaggcactgcagcgtgtgctttaccgctcagccaaacaggatccaacccgtcgctttcatgctctgtacgataaacttacgcgtagtgatgtcatgtggcaggcgtggattaacgtgtctaccaaccagggggcgccgggtgcggatggtgtctccattgatgcggtaaccgcgggcggttacgagggcgtcaccagttttctggacgagctctccacggaagtcaaagcggagacatatcggcctctgccactgcgtcgcgtgcatatccctaaagccggcaaaagtggcgagacacgcccgctcggaattccgtcgctccgcgatcgtgtgctgatgagcgccgccaaactgattctggaaccgatcttcgaagcgcaattttcgagtacctctttcggattccgccccaaacgtagcgcacatgatgccttagaagttatccgtcaatcggccaattcgggggctcattgggtcctggatgctgacatcaagagttgcttcgacgaaattgatcatgaagcgttgatggcgctgattgaacgtcgtgttagcgaccgggcaatgctgaaactgttacgcagctggttacgggccggcattatcgaaggtggggtttactcagactcagattctggaacgccccagggttccccgatttcgccactgctgtgcaatattgccctgtccgtgctggatgaagcattggccaaggcaaaaagtcaaacgggctctgtcgtgcgttatgcagacgattgggtcgtactctgtgcgactaaaaaacgtgctgagacagcgcggtccattgcggaagcggccctggcgccgctggggttgcgtctgcacccagaaaaaactcgcatcgtgcaccttactcgcggtaccgaaggttttgactttctggggttccatcatcacatggttgaaagctggaagtggcctggtcgctactaccttcagcgctggccgagcgatcgtgccatggctagcatcaaagtgaaagtacgcgaaatgaccgaccgtcgctatgtgggcttatcattggatgatgtagtggatcgtctgaacccggttctccgcggctgggcaggttatttccgtcgtggcaattcttcccggaagtttaacgttattgactcgtatgttgcagagcgtatggccatcctggcgagcaataagtatggattgagcggccgcaactggggcacgcgttttagctatgaatggtttaaaagtttaggcgtatatgctctgtcaggtaaagtgatcagccgcaccgcacacgcacagtga

SEQ ID NO: 240 - DNA, 1410 bp, synthetic construct
  source 1..1410: mol_type = other DNA
atggctagcgcatggagtcatcctcaattcgaaaaatccggaatgcagcctctggatccggaagtgcactatgggatctccgaccgctgctatctggaccggcatgaagtccccatggatctgttaccagataaactgcaccagttacgttggaaattgctccaaaaggcgaagaaagaacccaagtttcgtttctacgcactgtacgaccgtgtctatcgcattgacgtgctggaagccgcgtggaaacatgtggggaaacggggcaaagcttgtggaatcgacggcgtgcgtgcagaggatatcctggagcgcgaaaacggcgtggaagactttctggcaactatcttagacgagttaaagagcaaaacctaccgcccttcgccagtgaaacgcgtgtacatcccgaaagcagatggtaaaaaacgcccactgggtattcctaccttgaaagaccgtgttgttcagatggctgtagttcttattctggaaccgatcttcgaagccgactttcacgattgcagtcatggttttcgtccggggcgtaaagcccatgatgccctggatgctattcgggaaaaccttaaagcaggtcgcacggaagtatatgatgcggatcttaaaggttattttgatactattccccatgataaacttatggcgtgtgttcgtatgcgcgttaccgatcgcagcgtgctgggcctgattcgtggctggctccgcgcaccgattatcgaagaagatgataaaggcaaccggcagccgccgctgaagtcagaacagggtactccacagggcggcgtaatctcgcctctgttggcgaacctttacctgcactggtttgataaagtctttcatcgtccggatgggcctggtacgtgggcgaatgcgcgtctggtgcgttatgcggatgattttgtcattatggctcgctaccaaagcgcccgtatcgatgagtggatttctcatcgcctcgaagactggctgggattgacgattaaccgtgagaagacaagtgtcgtgcggttaaaacgtggagaaagcttagatttcctgggctttacgttccgctacgaccgcgacctctacgggggtacgcaccgctatttgaatgttgtaccgtccaagaaaagcctgaaaaaagcccgtgatgcgattcgtgagaaaaccggcccgaaaatgtgttataaaccgaccccggccgtcgttcgtgatcttaatacatatttgaaaggatggtgcggttatttcaagtatggctacccgcgtaaaagtttccgtgacctgggtcagtactgtcgctgccgcatgaccacccatctgaatcgtcgttcccagcgcaagtatcaccgcccgaaaggcatgtcatcttatcaatatctgcaagagattggtctgctccgtccatga

SEQ ID NO: 241 - DNA, 1323 bp, synthetic construct
  source 1..1323: mol_type = other DNA
atgaaccttagcaccccagaatccgttcagaaacttcaaacagcgctgcatacgaaagcgaaagaaagtccggattaccgcttttattgtctgtatgataaggtttatcgtgccgacgttttagcccacgcgtatcactgctgccgtgcaaatgggggtgccgcgggcgtggacggacagacttttgaatctatcgagtcagggggcttggacacctggctgggcgaattagccaaagaactgcgtgataaaaaataccgcccggaagctgtccgccgcgtttacattcctaagccgaatggctctaagcgtccgttgggtattcccacgattcgcgaccgggtggctcagatggcggcggtgttggtgttagagccgatcttcgaagctgaccttgaacccgaacagtatgcctaccgtcgtgatcgttcggcattggacgccgtgaaaaaggtgcacagcctgctgaacaccggccataaagaggtgattgatgcagatctgtccgggtacttcgacagcattccacatgctgaactgatgaaaagtctcgcgcgccggatcagcgaccgtcacgttctgcatctgattaagatgtggttggaagggccggtggaagaatccgatgaacgtgggaataaacaccgcacaactcgcaacaaagatgagggtcgtggcacccctcagggcgcgccgatctctcccttactgtcaaatctttatatgcgtcgttttgtgttaggttggaaagcgctgggtcactcgaaacgcctgcaggcgcatattgtgaactacgccgatgatttcgtgatctgttgtcggggaacagcgcaaagtgctatgcagacgatgacggatatgatggtaaaacttcgtctgactgttaatgaggcgaagacccatgtttgccgggtcccagatgagagctttgattttctgggttacaccatcggacgttgttggtcgactcgtaccggccaaccatacatcggcacgcgcccgtccaaaaaacgcatcgcgcgtgtctgcgaaaccattagtgagttaacgagccgtcgttggttgctgctggatgtcgacgagcgcgtccgccgtctcaaccgtaccctcattggttgggcaaactatttttgcctgggtccggtatcaaaagcataccgcgcagtagatgcccatgcacgttatcgtctgcgccagtggctgcgcgcgaaacataaagtacgtggcgccggcacggcccaatatccggacgaatatctgtatgcaaccctcggtctggtcgaactcgcccgccgcacccgggatttcccttgggctaaagtt

SEQ ID NO: 242 - DNA, 1308 bp, synthetic construct
  source 1..1308: mol_type = other DNA
atgatcaaagcttccgtgggcctgcaggatcttcgccgccgcatctatgtcaaagccaaagctgaaccatcctggcgtttttggggcctctacgtgcatgtgtgtaaaatggaagccttattcttagcatacgaaatggcgaaaaagaacgacggtgcgccgggtattgacggggttacgtttgcggcaattgaagcccagggagtagcggcttttttggaacagattcaagatgaactgatcgggcgcacctacgtcccactgcccgcacggaaacaagaaattcctaaagatgggggcaaagtccgtattctgtccatccctgccatccgtgatcgcgtagtgcaaggtgccttgaaattgattcttgagcccgttttcgaagcggatttccaggcaggatcgttcggttatcgcccaaaacgtgcagcgcgtgaagcggtaagtcgtgtggcacaggctattgcgcagtataagactcgcgtgattgacctcgatctgcgcgcctatttcgataccgtgcgccacgagttattgctcaaaaaagtggcgcagcggatcaacgacaatgacgttatgcacctgttaaaagtgatgctcaaagcctcaggcaaacagggtgttccgcaaggcggtgtcatcagtccgttgctgtcaaatctttatctgaatgaagttgatcgcatgcttgagcgcgccaaagttgtaacccggagcggtcagtatacgtatgtcgaatatgcgcgttttgctgatgatatggtcattctggtggatgcgcatcgtcgtcacgattggctgatgaaagctgttgagaaacgtctgcgcgaggaattcgccaagctgcaggttgaaatcaatgaagagaagtctagcatcgttgacctgagtcgcggcgaatcttttggctttctgggctttgattttcgtcgtacccgtagtctgaaaggtgtatggcgtccgtactacgccccgaaactcaaaaagcgcacagcactgctgcaaaagctgaaagaggtctttcgctcccatcaatctcagccggtcgatcgcattgttcatctgattaacccgattctgcgcggctgggtgaattatttcgcaattgggaactcgagccagtgcttcaactacatccaggactgggtggagaagaagatccgtcgtcatcttatgcgttcacgcaaacggcgcggctttggctggcaacggtggtcgcgtcagtggttatacggcggattaggtctgtttgacggttatcgtgtgtcgcgtgcgtggagcaaagccactagcgcggaacaggtaagc

SEQ ID NO: 243 - DNA, 1287 bp, synthetic construct
  source 1..1287: mol_type = other DNA
atgcaggaattaccgaacatcgatcgcatccgggaatttcagcgcaaacttcatgaaaaagccaaagcggatcctaagtatcgtttctattcactgtatgacaaagcatatcggatggatatcctcgaggaagcctatcgcaaagcgaaagccaatggcggtacttctggcgttgacggcgaaacgttcgatgatattgaagccaaaggtgtggctgaatacctgacggttttgcaaaaagaattaaaggaagagcaatacaacccgaaaccggtccgccgggcgtatattcccaaaccaaatggtaaaaaacgtcctctggggattcctactgtccgtgaccggatcgtgcagggcgcatttctgttgattttggaaccgatcttcgaagctgacttttgcgatagtagttttggatttcgtccagagaaaagcgctcaggatgcaattcgcgaaatctacaaatatcttaactggggttgcgaaaaaatctacgatgtggatctggaacagtattttgataccgtggagcactggaaattgatgaagctgctggcactgcgtatttctgatggaaaggtcttacatgttatcaaacaatggctcagctgtggctatgtagaagatggtcagcatcgtcaatcaaaacgcggcacaccccagggtggcgtgatttcgccgctcctggccaatgtgtatcttaatccggttgaccgcgcgtttgaacgcaatggcattggaacgatcaaacaaggttccattcatcttgttcgttatgcggatgacatggtgattctggcgcagaagaaccttgaaaaggggattacgctgttagactcctacgtggacaaactgggcttgcgtctgaacaaggagaaaacccgtcgcctggacctgccgactgataaaaaagtcaagtttctcgggttccagttccatcgggtcaccaaccgcaaaacacagaaacgcttaatcctggtatcgccgagcccaaaaagtcttaaacgctgtcgtgagaaagtgaagaccctgatcaaccactcgaacccgatggctgtacgcgagcaaattgaacgtctgaataagtacctctccggttggaccaactactttcgtctggggaacagcgcccacgcactgcaccaggtccgttactatgttaatcagcgtgtacgtcgtttaatccagcgccataaaggtcgtgagggctacggctggaaaaatattaccagcgcggatctgtacggccgcttgggtctgttctgcgattataaagttcgttggctg

SEQ ID NO: 244 - DNA, 1395 bp, synthetic construct
  source 1..1395: mol_type = other DNA
atgagcaaccgtttggatcaaccggcgaatgtgaacgagtcagatcacgaacgcacccgcttacgtgctcgtgacgttgttcgtgacgagggtatttcgtctcttcaggcactgcagcgtgtgctttaccgctcagccaaacaggatccaacccgtcgctttcatgctctgtacgataaacttacgcgtagtgatgtcatgtggcaggcgtggattaacgtgtctaccaaccagggggcgccgggtgcggatggtgtctccattgatgcggtaaccgcgggcggttacgagggcgtcaccagttttctggacgagctctccacggaagtcaaagcggagacatatcggcctctgccactgcgtcgcgtgcatatccctaaagccggcaaaagtggcgagacacgcccgctcggaattccgtcgctccgcgatcgtgtgctgatgagcgccgccaaactgattctggaaccgatcttcgaagcgcaattttcgagtacctctttcggattccgccccaaacgtagcgcacatgatgccttagaagttatccgtcaatcggccaattcgggggctcattgggtcctggatgctgacatcaagagttgcttcgacgaaattgatcatgaagcgttgatggcgctgattgaacgtcgtgttagcgaccgggcaatgctgaaactgttacgcagctggttacgggccggcattatcgaaggtggggtttactcagactcagattctggaacgccccagggttccccgatttcgccactgctgtgcaatattgccctgtccgtgctggatgaagcattggccaaggcaaaaagtcaaacgggctctgtcgtgcgttatgcagacgattgggtcgtactctgtgcgactaaaaaacgtgctgagacagcgcggtccattgcggaagcggccctggcgccgctggggttgcgtctgcacccagaaaaaactcgcatcgtgcaccttactcgcggtaccgaaggttttgactttctggggttccatcatcacatggttgaaagctggaagtggcctggtcgctactaccttcagcgctggccgagcgatcgtgccatggctagcatcaaagtgaaagtacgcgaaatgaccgaccgtcgctatgtgggcttatcattggatgatgtagtggatcgtctgaacccggttctccgcggctgggcaggttatttccgtcgtggcaattcttcccggaagtttaacgttattgactcgtatgttgcagagcgtatggccatcctggcgagcaataagtatggattgagcggccgcaactggggcacgcgttttagctatgaatggtttaaaagtttaggcgtatatgctctgtcaggtaaagtgatcagccgcaccgcacacgcacag

SEQ ID NO: 245 - DNA, 1365 bp, synthetic construct
  source 1..1365: mol_type = other DNA
atgcagcctctggatccggaagtgcactatgggatctccgaccgctgctatctggaccggcatgaagtccccatggatctgttaccagataaactgcaccagttacgttggaaattgctccaaaaggcgaagaaagaacccaagtttcgtttctacgcactgtacgaccgtgtctatcgcattgacgtgctggaagccgcgtggaaacatgtggggaaacggggcaaagcttgtggaatcgacggcgtgcgtgcagaggatatcctggagcgcgaaaacggcgtggaagactttctggcaactatcttagacgagttaaagagcaaaacctaccgcccttcgccagtgaaacgcgtgtacatcccgaaagcagatggtaaaaaacgcccactgggtattcctaccttgaaagaccgtgttgttcagatggctgtagttcttattctggaaccgatcttcgaagccgactttcacgattgcagtcatggttttcgtccggggcgtaaagcccatgatgccctggatgctattcgggaaaaccttaaagcaggtcgcacggaagtatatgatgcggatcttaaaggttattttgatactattccccatgataaacttatggcgtgtgttcgtatgcgcgttaccgatcgcagcgtgctgggcctgattcgtggctggctccgcgcaccgattatcgaagaagatgataaaggcaaccggcagccgccgctgaagtcagaacagggtactccacagggcggcgtaatctcgcctctgttggcgaacctttacctgcactggtttgataaagtctttcatcgtccggatgggcctggtacgtgggcgaatgcgcgtctggtgcgttatgcggatgattttgtcattatggctcgctaccaaagcgcccgtatcgatgagtggatttctcatcgcctcgaagactggctgggattgacgattaaccgtgagaagacaagtgtcgtgcggttaaaacgtggagaaagcttagatttcctgggctttacgttccgctacgaccgcgacctctacgggggtacgcaccgctatttgaatgttgtaccgtccaagaaaagcctgaaaaaagcccgtgatgcgattcgtgagaaaaccggcccgaaaatgtgttataaaccgaccccggccgtcgttcgtgatcttaatacatatttgaaaggatggtgcggttatttcaagtatggctacccgcgtaaaagtttccgtgacctgggtcagtactgtcgctgccgcatgaccacccatctgaatcgtcgttcccagcgcaagtatcaccgcccgaaaggcatgtcatcttatcaatatctgcaagagattggtctgctccgtcca

SEQ ID NO: 246 - DNA, 1746 bp, synthetic construct
  source 1..1746: mol_type = other DNA
atggctagcgcatggagtcatcctcaattcgaaaaatccggaatgaacaccccgacggaatggtgtcgtatgcaagtatcagaattacagcgtcgcttggcgcgtaaagccaccgataaaccggaacatcgttttaccaaactttatgacctgttaacctgggagccactcatggcgtgggcgtttgacaaactcatgaccaatgcgggtagccgtacggccggcattgatcgtatggacaaacgtaaagcgctccataatcgggaccttatcattgcggaactgcgtgttgctttgaaatccgggacctacaaacaccaaccggttcgtcgtgtgttcattcccaaggctaatggcaaacgtcgccctttaggcatccccactctgacggatcgcatggttcagatgatggtgaaggccattctcgaaccgatctttgaaagtgattttcgcccggaatcgcatggctttcgtccacagcgtagttgccacactgcattagcccatctgcatcaattaaccgcaccacgccagaaaaagatgaactgggtgatcgagggtgacattacgggttgctttgatcatattcagcataccacactgacccgtctgttgcggcgccgcctgcaggatcataaactgatgggcattatttggcagatgctgcaggcaggtgtcatggaaggtacgctgttcaccacgacatccgaaggtactcctcagggtggaattgtatcaccgcttctggcaaacatctatctgcacgagttggatctttggttccaccagaattataccggcttgaactataacgaaaagaaccggcgccggaagcgcaaagaggggaacgcgttttacgttcgctacgcggatgatttcgtggtggcttggaatggtacgcgcgaaggagccgaacagttgaaagcagccctcaccaccttcctgcgtgagcatctgggtttagagctgtcagcagagaaaacccgtattacgcatgtcactgacggatacgatttcctggggtttactgtaaaacgctatcgtaatcgcagcggcggatctacgctgatcacccgcccatctgaaaaaagcgtgatgaaactgaaagtcaaaatcaagaccatgacaaaacacggtacaacccgtgacgccgtgcgtgacaaaatcacagctatgaattacctgacccggggctgggctaactactttcgtcatagcgcggcttctggcacgctgcgttatgtgagccattacgcctttaagcgcgtcgaaatttggctccgcgcgaaaacccgtcaggggagcaaggcgatctatggctcgtactatcggcgtgatccgcacggccaccttacttggtccgccggcggtcaacacctgcatctgcctacgtatacgaaaattgaacgcttgcgctatgcgcatcgtccgaatccctatctgacggaaccggaagtatcgcctctgacgcacaacgaagccccgttcggcactaaagagtggggcggggcgcactactatggggaaggctggactgaaatccgcgcagcggtgctggaacgtgatgaacgcacttgtcgtacctgtgggaaaaagggcaaagttgaggttcatcacatccgcccgtggaaaccaggtatggcacatgaacttaccaacctgattaccctgtgcggtacatgccaccgccaagtccgtgatccgaaaagtgaggtcaatcgccaattagcccgtatgacaccgtga

SEQ ID NO: 247 - DNA, 1599 bp, synthetic construct
  source 1..1599: mol_type = other DNA
atggctagcgcatggagtcatcctcaattcgaaaaatccggaatggatatggatcgtcaggctgatgaagcttggattctcagcgtccaatccaaactttatcaatggtcgcaggccaacccgggtgatcagtggcgcgatatgtggagttggttaactgacattcgcacattacgctgtgcgtggcaacgtgcggcgtcaaaccgtggcgcgcgcacggcaggagtggatggcatgacggtcggccatatccgtgcaaacaagggcgaacagcgttttctcgagaaactgcaggccgagttgcgtagcggagcataccgtccatcaccgagccgccgtatcctgattccgaaagcgggtaaaccaggtcaatttcgtccgctgggtattccgactattaaagaccgcgtggcgcagggcgccgttaagcttttactggaacccatctttgaagcccagttctggcatgtaagttatggttttcggcctgggcggtcatcgcacggcgcattggagtacctgcgccgtgccgcgttgccccagaaacgcgaccaagacaaccgtcgctctcgcctgccgtatccgtgggtcatcgagggagacattaaagggtgctttgatcatatttctcaccaccaccttatgaatcgtttgcgggcgcgcgtgggtgatcatcgcgttacccgtctggtggtgctcttcctgaaagccggtgtcctggcagaggaccagttcctgcgtacagataatgggaccccacaaggcggaattatttccccgctgttgagcaacatcgttctgagcgcgatcgaagaacgttatgagcgctgggcgtatcatcgcaccaaactgtaccctcatcgtaaacgtgatggtgtggctgctgcggcgagcgcacggggtgcggatcgtaaagccggccgctgtgtctttttaccggttcgttatgctgacgactttatcttgttagtagctgggaccaaggaagacgcactggcggaaaaatctgcattggctgattaccttctggaaaccacgggcttagaacttagcccagaaaaaaccaaggtgaccgccctgactgatggctttgaattcctcgggttccgttttggcgcccactggaataagtgctacggctttggcacacgtgttgaagtgccgaaagcgaaagcagcggatctgcgttatcgcgtgaaacagctcacgcgccgtaataccacccttgtatccctgggggagaaactgaaagaaatcaatccaattctgcgtggatgggccaactattatcgctactgtgcctatgctggtgatgtgttcaccagcctggattggtatgttggtgaccgcatctggcattggctgcgctacaaacggccgaaggcctcggcacacgaaattctcgcgtcgcgccgcccttcacagctgcgtcgtactcgtaaagtttggcaggatggtagtacggagcaattcctgctgtccctgacgccggtatgccgttaccggctggcatggttaggcaaacccaacttcgccatgtctagtggtgaacctgatgccgaacggaaaagtcaggtccgttttggcaagcgccgctga

SEQ ID NO: 248 - DNA, 1605 bp, synthetic construct
  source 1..1605: mol_type = other DNA
atggctagcgcatggagtcatcctcaattcgaaaaatccggaatgacaccgaacggcgtgacgccatggccttcgctcgaggaagctcgcacgcgtgtgctgggaattcagcgcaaactgcatcgctggaccaaggacgacgcgaagcgcttcgatgacctgtttaatctgaccttcgaccgtgcaacccttctggtcgcctggtcgcgcgttcgcgggaaccgtggatctggaacggcgggtgtggacggggtcacccgttggcatatcgaacatcgcattggtgtggagcggttcctcgaggagctgcgcgaagcgctgaaagtccgcagttaccgtccacaggctgtgcgtgaacggggcattccgaaaccccagggtaaagtacggtatcttgggatccctaccattcgggatcgcgttgtgcagatggctttaaaactcgtgctcgagccgatttttgaagcggatttctgtcccacctcatatgggtatcgtcctgcacggcgtgcgcaggatgccatcgcggaaattgcacactttattaatccgccatccacttatgaatacgtgattgaaggtgatatccgtgcatgctttgataatgtgaaccaaggcatcctgatgcgcttagtgcgggaacgcattgcggaccgcaaagtgttggccttggtcaatgcgtttttacgtgccggtatgatgaaagagactggcggttttcgtgcgaccctgaccggcactccgcaaggcggcatcctgagcccgattctggccaatgtgtacctttctgtcctggatcgccacttcgagcgtgcctggaaatatcagacacgctatatcgagtgtactacctattaccgtcgtcgtggtctggcaacctatcgtctggtacgctatgcggatgacttcgttatcctggtgcgcggcagccgcgaacaggcggaagcgatccgcgaagaggtagcacgtctgttgtgggatgaattacagatggaactgtcagccgaaaaaacgtgtatcacgcacgtcgatgccggctttgattttttgggccatcgtattcgtcgcgttcagtggcgtggtaaaagtgtcgctgtcacctacccgtccaaaaaaagcctggaagcggttaaacgtgaagtaaaaagtctgaccacatgctggacacggaacctttctctccgtgttttgctcattcggctgaacccggttttgcgcggttggtccacgtacttccgctacgatgcgagcaagcgtactcttgcatacgtagaccattttgcctggtggcgcgttttccgttggctgcgtaagaaacacccgcagcgcagcgtgaagtatcttcgtcgtcgttatacgggcggccgctggcagatccaagaagaagatgttgaactgtttcgtccgagccgcgtgcgtgtcgaacgttatcgctatcgtggccgccgtattttagttccatggatggagccggaagaactgggccgtgttggtcgttacggttcatacgactttgatgaatgcgctttgctggaacgcttacaagaggctctggcatcggccgagcaaacgaccgtattatgcggggaacccgatgcccggtga

SEQ ID NO: 249 - DNA, 1518 bp, synthetic construct
  source 1..1518: mol_type = other DNA
atggctagcgcatggagtcatcctcaattcgaaaaatccggaatggatggcgataccagcgtcaatacgggtgtggtcgcgtggcccgaggatgacgccgcctggctgtcggtacgccggatgcagctcaaactgcatcgttgggcaagcgaagattccgcgcgtcgtttcggcgatctgtttaatcttgtgtatgaccccgcattcctggtacatgcttttgaacgtgtcgctggaaatgatggagcccgcaccgccggggtcgatggcgtgaccgtggcacaaatcgagacacgtgttggtgtgggcgtgtttttaggccaggtgcgcgatagcttaaaatcaggtgagtaccgcccgtcaccggtacgtcaggttaaaattccgaaagggggtggtaaacttcgtagtttaggtattccgacggtcgtggatcgtgtagttcaagcggcgtgcaaagctgttctggaaccggtgtttgaagctgattttttgccatgctcgtatgggtttcgtcctaaccgccgtgcgcaggacgcaatcgcggagattcatcatttcacctctcggcctgcggactaccaatatgttagcgaagcagatattgcggcttgcttcgacgaaatcgatcatgtggcagtgatggaccgcgttcggcgccgtattggagacaagcgtctgtgtgccctggtgaaagcattcctcaaagcaggtgtactgaacgatcttggcgatcgtgaagagtcactgactggtacaccgcagggcggtatcctgtccccgctcctggccaatatcgctctcagcgctttggatgaacactttacccgccagtgggacaccgataccggtatgctggggtcgccggcgcgtcgcgcaaaacgtaagcgtgatggcctgggcaattggcgtctggttcgctatgcggacgacttcgtcttactggttagtggggatcgtcaccacgccgaagccctgcgcgaagaagtcagcgcggttcttactccattaggtctgcgcctcgcaccagagaagacctcagtagtccacatcgatgaaggctttgattttctgggttttcacatccgtcgcatgcgcaagcgtggtaccaataaacattacgtgtacacgacgccgtctcgcaagagtgtccagaaaattcgcgatcgcgttcgcaacaaaacctatcgcagtacattaaacatggaccttgacgaactgattgcgggcctgaaccgctctatgcgtggctgggccaactacttccgtcatggggtgagcaaagctacttttaatactgtcgacaaccatgcgtggttgcgtttggttggctggattcgccgtaaacatcgtaacacgtcccgcaaacagttgcggcgtcggttctgtgatcaaggatggcggattgcccacaatggagtagtgtttacgggcgcctcttcggtggcggttacccgttatcgctatcgtggcgcgaacatcccaacaccttggacgcaggccgcgacttccagctga

SEQ ID NO: 250 - DNA, 1473 bp, synthetic construct
  source 1..1473: mol_type = other DNA
atggctagcgcatggagtcatcctcaattcgaaaaatccggaatgaacaccgatgaaagcgaacacgcactgtatgaagccgagcgccgcgtgttagagatccagaccaaacttcatcggtgggcccgcgaagattcgcatcggcgttttgatgatcttttcaatcttgtcgctgatccggcgtttttgttggttgcgtgggctcgtgttcgtggcaataagggtgcgcgttctgctggagttgatggagaaacggcatactacgtggaagcagtccgtggcgtggaagtctttctggatcgcttgcgtacatccttaaaagatcgctcattttgtccgttacccgttcgcgagcgtatgatcccgaaagcgggtggcaaacttcgtcggctcggaattgccacggtaacggaccgtgtggtgcaggcgtccctgaaactggtgctggaacctattttcgaggcggacttcttaccgtgctcttacggatttcgtccgaaacaccgtgcccatgatgcggtagcagaagttcgtcacttcaccagtcatagctacgagtggattgtggaaggcgacattaaagcatgttttgacgaaattagccatcttgctctcttggaccgtgtgcgggcgcgtattggggacaaacgtgtgctggccctggtgaaagcattcctgaagagcggtatcttgggtgaagatcgtgttttgcgcgagaatgacgcaggtacgccgcaggggagcattttgtctccactcctgtcgaacgtcgcgctgtcggtcctcgatgaatatattgccaaaggcccgggcgggcccggttcaactttcaatgatcgcatcaagcgtcgtcggcgtggcctgccgaactaccgcctggcccgctatgccgatgactggtgcctgatgatccacggcatccgtgccgatgcggaagtactgcgcgaagaaatcgccggggtgttagctccaatgggcctgcgtttaagtgaggaaaaaactctgatcacccatatcgatgaaggcttagactttcttggttggcgtatccaacgccatcgcaaacgtgggtccaaccgctactatgtctatacatatccggcacgcaaggccctggctgcggtaaccgataaagtaaaagcgcaatgccgtaaaaccggcactgacctgcctctggatgctctgctgatttgtctgaaccgcatgctgcgcggctggtgtgcatattttcgcccaggtgtctcgtcaacagcgtttcagtacctgagcagctatacctgggggcgcgttattcactggctgcgccgcaaacatccccacatgaactggaaagagctccgtcggcgtttttgcggcggcggttggtggccggcgtccgaagagcgcgaactcttcaatcctgcgaaggttggtacgacccgttatcgctatcgtggtagtgtgattcctagtccgtggccaattaccggttga

SEQ ID NO: 251 - DNA, 1701 bp, synthetic construct
  source 1..1701: mol_type = other DNA
atgaacaccccgacggaatggtgtcgtatgcaagtatcagaattacagcgtcgcttggcgcgtaaagccaccgataaaccggaacatcgttttaccaaactttatgacctgttaacctgggagccactcatggcgtgggcgtttgacaaactcatgaccaatgcgggtagccgtacggccggcattgatcgtatggacaaacgtaaagcgctccataatcgggaccttatcattgcggaactgcgtgttgctttgaaatccgggacctacaaacaccaaccggttcgtcgtgtgttcattcccaaggctaatggcaaacgtcgccctttaggcatccccactctgacggatcgcatggttcagatgatggtgaaggccattctcgaaccgatctttgaaagtgattttcgcccggaatcgcatggctttcgtccacagcgtagttgccacactgcattagcccatctgcatcaattaaccgcaccacgccagaaaaagatgaactgggtgatcgagggtgacattacgggttgctttgatcatattcagcataccacactgacccgtctgttgcggcgccgcctgcaggatcataaactgatgggcattatttggcagatgctgcaggcaggtgtcatggaaggtacgctgttcaccacgacatccgaaggtactcctcagggtggaattgtatcaccgcttctggcaaacatctatctgcacgagttggatctttggttccaccagaattataccggcttgaactataacgaaaagaaccggcgccggaagcgcaaagaggggaacgcgttttacgttcgctacgcggatgatttcgtggtggcttggaatggtacgcgcgaaggagccgaacagttgaaagcagccctcaccaccttcctgcgtgagcatctgggtttagagctgtcagcagagaaaacccgtattacgcatgtcactgacggatacgatttcctggggtttactgtaaaacgctatcgtaatcgcagcggcggatctacgctgatcacccgcccatctgaaaaaagcgtgatgaaactgaaagtcaaaatcaagaccatgacaaaacacggtacaacccgtgacgccgtgcgtgacaaaatcacagctatgaattacctgacccggggctgggctaactactttcgtcatagcgcggcttctggcacgctgcgttatgtgagccattacgcctttaagcgcgtcgaaatttggctccgcgcgaaaacccgtcaggggagcaaggcgatctatggctcgtactatcggcgtgatccgcacggccaccttacttggtccgccggcggtcaacacctgcatctgcctacgtatacgaaaattgaacgcttgcgctatgcgcatcgtccgaatccctatctgacggaaccggaagtatcgcctctgacgcacaacgaagccccgttcggcactaaagagtggggcggggcgcactactatggggaaggctggactgaaatccgcgcagcggtgctggaacgtgatgaacgcacttgtcgtacctgtgggaaaaagggcaaagttgaggttcatcacatccgcccgtggaaaccaggtatggcacatgaacttaccaacctgattaccctgtgcggtacatgccaccgccaagtccgtgatccgaaaagtgaggtcaatcgccaattagcccgtatgacaccg

SEQ ID NO: 252 - DNA, 1554 bp, synthetic construct
  source 1..1554: mol_type = other DNA
atggatatggatcgtcaggctgatgaagcttggattctcagcgtccaatccaaactttatcaatggtcgcaggccaacccgggtgatcagtggcgcgatatgtggagttggttaactgacattcgcacattacgctgtgcgtggcaacgtgcggcgtcaaaccgtggcgcgcgcacggcaggagtggatggcatgacggtcggccatatccgtgcaaacaagggcgaacagcgttttctcgagaaactgcaggccgagttgcgtagcggagcataccgtccatcaccgagccgccgtatcctgattccgaaagcgggtaaaccaggtcaatttcgtccgctgggtattccgactattaaagaccgcgtggcgcagggcgccgttaagcttttactggaacccatctttgaagcccagttctggcatgtaagttatggttttcggcctgggcggtcatcgcacggcgcattggagtacctgcgccgtgccgcgttgccccagaaacgcgaccaagacaaccgtcgctctcgcctgccgtatccgtgggtcatcgagggagacattaaagggtgctttgatcatatttctcaccaccaccttatgaatcgtttgcgggcgcgcgtgggtgatcatcgcgttacccgtctggtggtgctcttcctgaaagccggtgtcctggcagaggaccagttcctgcgtacagataatgggaccccacaaggcggaattatttccccgctgttgagcaacatcgttctgagcgcgatcgaagaacgttatgagcgctgggcgtatcatcgcaccaaactgtaccctcatcgtaaacgtgatggtgtggctgctgcggcgagcgcacggggtgcggatcgtaaagccggccgctgtgtctttttaccggttcgttatgctgacgactttatcttgttagtagctgggaccaaggaagacgcactggcggaaaaatctgcattggctgattaccttctggaaaccacgggcttagaacttagcccagaaaaaaccaaggtgaccgccctgactgatggctttgaattcctcgggttccgttttggcgcccactggaataagtgctacggctttggcacacgtgttgaagtgccgaaagcgaaagcagcggatctgcgttatcgcgtgaaacagctcacgcgccgtaataccacccttgtatccctgggggagaaactgaaagaaatcaatccaattctgcgtggatgggccaactattatcgctactgtgcctatgctggtgatgtgttcaccagcctggattggtatgttggtgaccgcatctggcattggctgcgctacaaacggccgaaggcctcggcacacgaaattctcgcgtcgcgccgcccttcacagctgcgtcgtactcgtaaagtttggcaggatggtagtacggagcaattcctgctgtccctgacgccggtatgccgttaccggctggcatggttaggcaaacccaacttcgccatgtctagtggtgaacctgatgccgaacggaaaagtcaggtccgttttggcaagcgccgc

SEQ ID NO: 253 - DNA, 1560 bp, synthetic construct
  source 1..1560: mol_type = other DNA
atgacaccgaacggcgtgacgccatggccttcgctcgaggaagctcgcacgcgtgtgctgggaattcagcgcaaactgcatcgctggaccaaggacgacgcgaagcgcttcgatgacctgtttaatctgaccttcgaccgtgcaacccttctggtcgcctggtcgcgcgttcgcgggaaccgtggatctggaacggcgggtgtggacggggtcacccgttggcatatcgaacatcgcattggtgtggagcggttcctcgaggagctgcgcgaagcgctgaaagtccgcagttaccgtccacaggctgtgcgtgaacggggcattccgaaaccccagggtaaagtacggtatcttgggatccctaccattcgggatcgcgttgtgcagatggctttaaaactcgtgctcgagccgatttttgaagcggatttctgtcccacctcatatgggtatcgtcctgcacggcgtgcgcaggatgccatcgcggaaattgcacactttattaatccgccatccacttatgaatacgtgattgaaggtgatatccgtgcatgctttgataatgtgaaccaaggcatcctgatgcgcttagtgcgggaacgcattgcggaccgcaaagtgttggccttggtcaatgcgtttttacgtgccggtatgatgaaagagactggcggttttcgtgcgaccctgaccggcactccgcaaggcggcatcctgagcccgattctggccaatgtgtacctttctgtcctggatcgccacttcgagcgtgcctggaaatatcagacacgctatatcgagtgtactacctattaccgtcgtcgtggtctggcaacctatcgtctggtacgctatgcggatgacttcgttatcctggtgcgcggcagccgcgaacaggcggaagcgatccgcgaagaggtagcacgtctgttgtgggatgaattacagatggaactgtcagccgaaaaaacgtgtatcacgcacgtcgatgccggctttgattttttgggccatcgtattcgtcgcgttcagtggcgtggtaaaagtgtcgctgtcacctacccgtccaaaaaaagcctggaagcggttaaacgtgaagtaaaaagtctgaccacatgctggacacggaacctttctctccgtgttttgctcattcggctgaacccggttttgcgcggttggtccacgtacttccgctacgatgcgagcaagcgtactcttgcatacgtagaccattttgcctggtggcgcgttttccgttggctgcgtaagaaacacccgcagcgcagcgtgaagtatcttcgtcgtcgttatacgggcggccgctggcagatccaagaagaagatgttgaactgtttcgtccgagccgcgtgcgtgtcgaacgttatcgctatcgtggccgccgtattttagttccatggatggagccggaagaactgggccgtgttggtcgttacggttcatacgactttgatgaatgcgctttgctggaacgcttacaagaggctctggcatcggccgagcaaacgaccgtattatgcggggaacccgatgcccgg

SEQ ID NO: 254 - DNA, 1473 bp, synthetic construct
  source 1..1473: mol_type = other DNA
atggatggcgataccagcgtcaatacgggtgtggtcgcgtggcccgaggatgacgccgcctggctgtcggtacgccggatgcagctcaaactgcatcgttgggcaagcgaagattccgcgcgtcgtttcggcgatctgtttaatcttgtgtatgaccccgcattcctggtacatgcttttgaacgtgtcgctggaaatgatggagcccgcaccgccggggtcgatggcgtgaccgtggcacaaatcgagacacgtgttggtgtgggcgtgtttttaggccaggtgcgcgatagcttaaaatcaggtgagtaccgcccgtcaccggtacgtcaggttaaaattccgaaagggggtggtaaacttcgtagtttaggtattccgacggtcgtggatcgtgtagttcaagcggcgtgcaaagctgttctggaaccggtgtttgaagctgattttttgccatgctcgtatgggtttcgtcctaaccgccgtgcgcaggacgcaatcgcggagattcatcatttcacctctcggcctgcggactaccaatatgttagcgaagcagatattgcggcttgcttcgacgaaatcgatcatgtggcagtgatggaccgcgttcggcgccgtattggagacaagcgtctgtgtgccctggtgaaagcattcctcaaagcaggtgtactgaacgatcttggcgatcgtgaagagtcactgactggtacaccgcagggcggtatcctgtccccgctcctggccaatatcgctctcagcgctttggatgaacactttacccgccagtgggacaccgataccggtatgctggggtcgccggcgcgtcgcgcaaaacgtaagcgtgatggcctgggcaattggcgtctggttcgctatgcggacgacttcgtcttactggttagtggggatcgtcaccacgccgaagccctgcgcgaagaagtcagcgcggttcttactccattaggtctgcgcctcgcaccagagaagacctcagtagtccacatcgatgaaggctttgattttctgggttttcacatccgtcgcatgcgcaagcgtggtaccaataaacattacgtgtacacgacgccgtctcgcaagagtgtccagaaaattcgcgatcgcgttcgcaacaaaacctatcgcagtacattaaacatggaccttgacgaactgattgcgggcctgaaccgctctatgcgtggctgggccaactacttccgtcatggggtgagcaaagctacttttaatactgtcgacaaccatgcgtggttgcgtttggttggctggattcgccgtaaacatcgtaacacgtcccgcaaacagttgcggcgtcggttctgtgatcaaggatggcggattgcccacaatggagtagtgtttacgggcgcctcttcggtggcggttacccgttatcgctatcgtggcgcgaacatcccaacaccttggacgcaggccgcgacttccagc

SEQ ID NO: 255 - DNA, 1428 bp, synthetic construct
  source 1..1428: mol_type = other DNA
atgaacaccgatgaaagcgaacacgcactgtatgaagccgagcgccgcgtgttagagatccagaccaaacttcatcggtgggcccgcgaagattcgcatcggcgttttgatgatcttttcaatcttgtcgctgatccggcgtttttgttggttgcgtgggctcgtgttcgtggcaataagggtgcgcgttctgctggagttgatggagaaacggcatactacgtggaagcagtccgtggcgtggaagtctttctggatcgcttgcgtacatccttaaaagatcgctcattttgtccgttacccgttcgcgagcgtatgatcccgaaagcgggtggcaaacttcgtcggctcggaattgccacggtaacggaccgtgtggtgcaggcgtccctgaaactggtgctggaacctattttcgaggcggacttcttaccgtgctcttacggatttcgtccgaaacaccgtgcccatgatgcggtagcagaagttcgtcacttcaccagtcatagctacgagtggattgtggaaggcgacattaaagcatgttttgacgaaattagccatcttgctctcttggaccgtgtgcgggcgcgtattggggacaaacgtgtgctggccctggtgaaagcattcctgaagagcggtatcttgggtgaagatcgtgttttgcgcgagaatgacgcaggtacgccgcaggggagcattttgtctccactcctgtcgaacgtcgcgctgtcggtcctcgatgaatatattgccaaaggcccgggcgggcccggttcaactttcaatgatcgcatcaagcgtcgtcggcgtggcctgccgaactaccgcctggcccgctatgccgatgactggtgcctgatgatccacggcatccgtgccgatgcggaagtactgcgcgaagaaatcgccggggtgttagctccaatgggcctgcgtttaagtgaggaaaaaactctgatcacccatatcgatgaaggcttagactttcttggttggcgtatccaacgccatcgcaaacgtgggtccaaccgctactatgtctatacatatccggcacgcaaggccctggctgcggtaaccgataaagtaaaagcgcaatgccgtaaaaccggcactgacctgcctctggatgctctgctgatttgtctgaaccgcatgctgcgcggctggtgtgcatattttcgcccaggtgtctcgtcaacagcgtttcagtacctgagcagctatacctgggggcgcgttattcactggctgcgccgcaaacatccccacatgaactggaaagagctccgtcggcgtttttgcggcggcggttggtggccggcgtccgaagagcgcgaactcttcaatcctgcgaaggttggtacgacccgttatcgctatcgtggtagtgtgattcctagtccgtggccaattaccggt

SEQ ID NO: 256 - DNA, 1905 bp, synthetic construct
  source 1..1905: mol_type = other DNA
atggctagcgcatggagtcatcctcaattcgaaaaatccggaatggccaaaggcggcagctacattaacagcatcctgctgatggagaatgttaagtatattatgacgaacccagaaatcatcctgaataaccttgtaaaacactcaaaaatttctggttacaaattcgagcgcttgtaccggatcctgttcaacgagcaaatgttttatcaggcctatcagcgcattgcgtccaaaaaaggaaatatgacctcgggtacggacggcaaaacggtggatggtatgtcaattgaacgcattgagcgccttattgcttccctgcgtgatgaaacctataaaccgcatccggcaaaacgcgtgtatatccctaaaaaaaatgggaaaaaacgtccgctgggcattccatcgtttgaagataaacttgttcaggaagttgtccgcatgatcctggaagcagtgtacgaaggttattttgaaagcacatctcacggtttccgcccccgcaaaagttgccagacggccttgacctcgattcgcaacacatttttaggcactaagtggtttattgaaggcgatattaaaggttttttcgacaacatcgatcacaatgtgctgatcgaaactttgcgtgaacggattaaagacgatcgttttctgcgtttaattcgcaagttcctgaacgccgggtatatcgaagactggaagttcaacaatacctattctggtacaccacaagggggcattatctcgccgatcctcgcgaatatctaccttgaccgttttgacaagtacatcgcagagtacatccagaaatttgatacaggtaagacccgtccgaaaaatcgtgagtaccgtatctatagcgatcgtaaacggcgcttactcgcgaagtttaatgccgaaaccgacgcggataaacgtgaagaaatggctcagcgtttaaaggaatattctcgtcttatgtatgaacatccgtctgtggacgaaatgacgcccacctataagcgtatgaaatatgtacgctacgctgatgacttcctgattggagtctgcgggagtaaagcggagtgcgagatcattaaaaacgatattgcgatgttcatgaaagagaagttaaagctggagctgagcgacgagaaaacgttgatcactaatgccaaagatcgggctctgtttctcggttatgaaatcaccgtgcgtcaaagccaatcgactaaacgggataaaaatggcatgctgaaacgcatgttcaatggtaaagtaattctgctgctcccgcgcgaagtcgcgcgcaaacgtctgttatcctataacgcgatgaccatcattcaggtgaacggcaaagaagattggaaaccaaaaagtcgcggcgcaatgaacaactgtaaacctgaagatatcttggctaaagttaactcagagatccgtggtttctacaattattatgctattgcgaacaatattagcacgctgggaaagcgttttggctacgttatgagttatagcttctactgtaccctggcccagaagttaaacatttcctaccccaaagtcattaaaaaatatcgtgaaggcaaagattgtgtaattcgctataccgatgcgaaaggtcgtgaacgctgccgtatgttgtacaatggcggatttcaacagaaagaaccgacggcggatgccaagtgtgacaatcttccgaacccgtttgttatttcatccccgagcctggttgaacgcctgaaagccgaggtgtgtgaattgtgcggcgcaaaagggaaaactgtcatgcatcatgtgcgtacgctcaagaccctgaccgaaaacaccgcgtgggaacgtgcaatgctgcagatgcatcgtaaaagtctggcagtctgccctaactgctacgcacacattcatgacgattga

SEQ ID NO: 257 - DNA, 2970 bp, synthetic construct
  source 1..2970: mol_type = other DNA
atggctagcgcatggagtcatcctcaattcgaaaaatccggaatgttagaagttaaagtttccaaccggttgacttgtctgaccactatctctggccctgccaatgttgtctgtcccatcgactcaggcatcctgttccaccgttattatgtttttatttctatcaataccccgttacattcaacaccgatgcgcgtgtgttcgttttttaatgcatgcagtaagaaacgtagtaattgctttaaagcggcaattcgtggattttccagcgatctttctagctccgaagataaagatcgcacagtcgttagcgtgagcagcaaagagtgtttcctgccggttccgtcgcgcaaagcggatatgtcgttgtctgtacagtccattccgagcaaactgtcaaataatcacgtggaaggaagcaccgacgtggtcgactcgttacgccaactgaaaccagaaaaagatggtatctacacccgtattaccacccggtttctggccaatcctgagttcctgaaacttgcgtatgctcatatcaaaaataaagaagggaacatgaccagtggtggctctaactcaaacatcattttggatggcatcagccagaagtggtttgaagatactgcccttcgcctgaagaatggcacgtatgagttcagcacctctcgtaaaattaacatcccgaaaaaaggctcgctgaaattgcgccccttaaccattggtaatttgcgtgacaaaattatccagaaagcgattcaactggtgttggaagaaatctatgaaaacaaggaaaaaatctttagtgatgccagccatggatttcgcccgaatcgctcatgccatacggcactgcaacaaattaaaaacgaatggaccgccattccatggtttatctccattgacattaaggatgccttcggaaccattaatcgcgacatcttaatcagttgcctgaaagttaaaatccgtgaccagcgtttgttcgagattttacttaagatgttacaagcggatattatttccattaacggtatctggaaagaattttatggcgtaccgcagggcaatattttatccccgatcctggccaacatctatttccacgacctggatgtttacattgataaaaaaatcattaaccgctacaaaaagggcacaaaagcagcgcgctgtctggattaccagcgtgctgtttcttttactaatgaggaaaaaaaagcaagtctccaaaaacgcaagcagctggctcgtcggaaacgccgtgacgctcataaagctggtcttcgttataccaaaattgatggtagctttattcgtgtaaagtacgtccgctatgcggatgatttcctgatcggggtgcgtggcccgaaaaccttggtcctgaagattttccggtctgtcatcttctttctgaaatcgacactccagcttaacctgaacgaggagaaaagtaaaatcattgatagctttagcaacaagatcagcttcttgggtatgctgattcataacgtgtcaacgaaaaaactgccttttcgcaaaagtcgtgcgttacagaataaaaaacgtaagctgacgcgtgtcctgctgcgcgcggatgcattagaaaatcagcgcactaaaaaactgaaagatgagtgcctgaagttgctccgtaatagttataagtcgtcccgcaaagatcggaagccgttgaaagaagacttcatctctttgattaaaggttctcctgtatttggtgacgttatcaaaaactcaaaccgtgcaatctaccgtgagttcatccaaagccttctcctggtgtccgatattcaggaaaaccataccctcaaagattttctgaacctgtgggaaaaggagctgtcattagacacggaaaagttcaaaaacgagaattctcctacgcgtccgattacgaaaagtgaaaccatccgtcgcattgtagagattctgaaagtgcagcacaaccttccagcacaggaagtgcagtggtttcagctgttcaaaggggcgaacaaagcccgcgggtcggcatggaaaccggtgtggattgacaaattttcactgagcaaaaacgctgtgtccaaactgaaattacctgtgaataatatctatcacgtaaagtataacgtggagaacattcgcctggtcattgaagatcttctgctgcaagcggaacaacgcccgagcaaaacctacattgatcatattccaaacaacaatgcgaaaagtgttcgtcagacgtgggatgaagaaggcgtctttacgtctttgccgccacagattaacagcgatacgtcggaaatctataaacgcttaaaagaagcatccatcattaattcgaaaaaaaagcccatttgtaagaattcgctcctggctgcggaagcgtggctcatcatttcatattacaataccctggcgcacggtctgctcagctactttcgctgcgttgataatttcaatacgatcaaaaaaatcgtcacttaccaccttcgttatagcctgttacacaccttggcgcataaacataagtgtagtatcaagaaggttctggagatctactcgaaagagattaaaaccaatggccgtcagggcaaggtcgtgtcgtttattaactccatcgccgtgacaaaccttaaaaaggactttctcttcaaagacctgcgtaacccgtacagcaacctcacgaaaagttatatttcactccagcggggtgctatttccgccaataagtgcgccgtaaaaaactgcgtggaaacagacaatattgaagtgcatcacgtgcaaaaactgttccggaacattgaccgtactgggaaagtagtgattcagggtattgccaaaaaactgtcaggccgtctggccatggaaagcgcgctgaaacggaaacaaattccgttttgcccaaaacaccataaagattggcataacggggttattagcaaaattgatctggatgaaccctgggtctga

SEQ ID NO: 258 - DNA, 2607 bp, synthetic construct
  source 1..2607: mol_type = other DNA
atggctagcgcatggagtcatcctcaattcgaaaaatccggaatgcgtgatgttaataatggctggctcgtgcgctatctgcacagcaatactgcttcagcattcttctttctggtgtacctgcacatcggtcgtggcatgtactatgggagctatcgtgcgcctcgtaccctggtatgggctatcggtacggttagcgccccgaaaggccgctactttggtagtgtccctcgccgcctgttcaaatccggtattgatagtattcagttcgaatatcgcatgccattaccgggtatgtggctgattaccctgtcctttggtattgcgggtggtcgttgctctatggtccgtatcctgttcaacctgcagctgacggcatcaggcatctggcatggtaaagataatgaattagatacaatcaaacatcaccgtccgcgtggtaatgatcataaccgttcctgccaccattttgacggcgtattacgtgttatttggctggcgcatggcgagacgaccaccccctcagcaacatcccgtcgcttcaactgctgtaagtgcctgaaccaaaaagtcaccaatcttagcctgcttcgggatcgtacggcatatgcaattggcacgcgtcgtcgctcttttcatacgcgtggtcgcgtcgaacggccacagcaggactccaaaggctcctcttttaatcaggagattctggaaacgaaagtgctcgagcagcgcaaggcggcgggcctcaccagcagtaaagtacgcaaaggcgggaaacgcgcagcgctcgtgacactggtgcgcaaagaacttcaattgtacctggataaacgcggatcgtataatggcctgatcaatattctgaaaaacccggagtaccttgtagcttgttatgagtcaattcgcggcaaaccgggaaacatgactaaaggttccaccaaggaaacgttagatggtttaacttgggaatggtttgtcaaacttggtgaatcattagccaaaggcaagtttgactttaccccagcacgtcgcgtcatgattccgaaagctaatggaaaactgcgtccgctgggcattaattcgccgcgcgaaaaaatcgtccagaaagccctggcggttattatggagcagatttgggaacgcatttttctgaactcgtctcacggctttcgcccgaaccgttccatccattctgcactgaaagaattatatttggaagggggtaactacaactgggtaattcagggggacattgaaaaatgctttgatgccatcccacacagtgtcatcatgaaccgtgtacagaaaattatcaagtgcaaacgcacgctcgagctgattaaaaagtcgctcgatgccggctacatcgatcccgatactaaaaaaacggtgaatagtgatctgggaactccgcaaggaagcgtgctgtcgcccttgctgtgtaatattgtgttacatgacttcgatgcgttcatgtcatcgatgcgcgaagaatataactttggtgaaaaacgtcgtccaaaccccgattacgtgaaactgaatagtaaacgtcggtatatccgcgatattcgggaacggcgtaaaattcttcgtgaaatgcgtcagctgctggctagcgatcctatggacccgaatttcaaacggctgaagtatatccgttatgctgatgattttgttatcttaatcatcggcccgctcggcgatgcggaaaagatcaaagaacggattcgtgacttcttattgaacaaatgtgggctgaccctgtcgctggagaagacggtgattagtaatatccagaccgaaggttttaagtttctgggtgcggaatgtcgtcgcgccagcatgaccaaaaatcacgttgtgaaacataaagaccgtacgatccgtgcgacaacccgtctgcgcgttaacattgatctcactaaggtctacaagaagttggtgagcattaaagttgcgacctgggataacaaaaatttgcaggtgccgcgcggtaccgcgaacaacgccttgattaacttctctcatgccgaaatcatttcttggtacaacagcaagatccaggggatccaaaatttctacagcttcgctggcaatcgtaaacgtctgcacttggtgttttggattctggcttcgtcttgcgcactgacattagccaagaaacataaaatgagcagcatgggccaaatcttcaaaaaatttgggcgcaatcttacctgcccagagacagacgttagtctcgttcgcccgtccgcgttagaagccattcatgattacaagtctaacaatgtaccggataaccttgactttctggacgtgacctgggccgccaaacttactgagtcaaacattgggaaaagttgctttttatgtggctccaccaaagacatcgagatgcatcacttgaaaagcgttaaagacgtgaaacaaaagatccgcaacggaaacgcctcgttctcggcgtggaaaggcgcatttttgcgtaagcagatccctctgtgtagctatcaccacgatctttatcatgggggcaaactgaactatgcggatttgaaacaaattagtagcttcaccaaactgcctgacagcccgtcagacaacaaatga

SEQ ID NO: 259 - DNA, 1782 bp, synthetic construct
  source 1..1782: mol_type = other DNA
atggctagcgcatggagtcatcctcaattcgaaaaatccggaatgaaagaaaaggaagatcgcaaactcttgtccagcaaagatattattagtaaagatattacgtatgagctcctggcaatcatcaagaataaaggcaacaatcggtacggttatcttctgaaattcattagtaacgtcgacgtgttactgtcatcctttgaacatattgtacgtaaagatggttattactcgaagggttctgacaaacagattttaagtaacgttgacattaagtacttcgagaatctttcgcgcgaactgaacagcggatcctataaaccgaatccgtcgcgtcgtgtttatatttctaaacctgatggcagcaaacgcccattaggcatcagctgctctcgtgataaaattgtacaacaagcatgtatgattgccctgtcgtatatctatgagagtatttttttagaaaactcacatggctttcgtccatacaagtcatgtcacacggccatcaactactttaaacttcacttcacgagcaccaagtggatcctgaacattgacctcaagggatgcttcgataatatcaatcaccagaaattgatctcgattatcaatgagaacgttgacgataaaggctttgaaattctgtattggaaaatggtgacagcgggttatatctatcgtggtacccactttaaaaccattgaaaaaggaactccccaagggtcaattctgtctccgattctgtgcaatatctttctgaacaagctggatatctatcttctggacttgaaaaatgaatttgacaaagggaccgaaaaacgcaaaaacaaaagttatcgtaagctggctgtcaaagaagcacgtaaacagttcattacctctcgtgatcagatggataccaactttaaacgccttaactttgttcgctatgcggatgatttcattatcggcattgatggtagtttgagcgacgcgcagctgattggggcgaaagtcgaaaaatttcttaaaggagagctgctgtttgaaatcaaacgcttcaccattaaaaacttttgtcaggaaggtgataactttctcggcttcacgctgaaagggtggacgactaagagtcgtaaaattatcaatacgaaaaaaggcaaacaattggtgaaccatcgcccaaaggtcctgattccgactacgaagattctgaacaaattgcatgaaattggcctcgttaagaaatacagcaaccattttcgtgggaccgcctaccggaaactggtagagcatccgttatacaatattgtggagtattttaattcagtgtatcgcggcatcgcgaattactactgcatcgcctacaatattaacaccctgcgcaacctgaattacattttaaaagtgtcatgctgcctcacaatcgctctgaaaatgaaattattcactgttagcaaggtgctgaaaaagtatggtcggaatgtgacaatcaatgaaaacgatagcaccatcaagttcatttcctaccgtaaactgaagaaaccgtatttcaaaagcatcgaaccgttcaatttggacaacatcatcaaattttttagctatggcttgcggagcaaacttaaaaccaacaaaggctgtgaaaactgtggttcgtccctcaacctgtctctgcaccacttcaatcccgtacgcaatatcaaccctaagctgaaaacattagagaaaatcaaaattaaagtcggtcgccagcagattctgctgtgccgtgaatgtcataataaactgcattccgctaaatga

SEQ ID NO: 260 - DNA, 2547 bp, synthetic construct
  source 1..2547: mol_type = other DNA
atggctagcgcatggagtcatcctcaattcgaaaaatccggaatgcggaaacataaacgcatccacttcggtgtgttcctcaacatccggagcttaatgatttgcgagtcgagcttattagcaatcacgatgcttctgaccgaccgccgtgcgacggttcggtttctgtggaaattgcgtttgcttattaaccataaccttctgaacagcggtatgtttcaaaataccgaaatcctcacatggcactactcctcaaccgatgctggtgataatagcctgtaccttacaggcgtgagcgatcttgggactgtgaaagcctacccgctgcgtaaagtgaccaatcaggtccagtgggtcattcgcgaaggggaaaccctcgctggtccagtggatcgttcaagcatgccgacgttaacaagctgccaggcgttagcgattcatctggagacagagtcttttgatgctgatcttcccattcctaaggttgaccagctggtgtttaacaaaaaatcgtccgaggcaaagccacacctctcgtttatgccgagcattgcaattcccgttaacctgcaaaaccacaaaaaaaagatgcgccgcgggcgtggcgccgttgtacccaatacgatgggccgtgctctgtgcggcctgagctttacccaggatcgttcgctgtctaccaaaacctttcaaagtgacgtctctcagggtcggatcccaaatactatgattaaacgcctcgaaacgctgtctaagctttttacccacaatcctgacgcccaggcagatggattgatgcgtattctcaaagattcccaaatttgggttgcggcctacatcaaactgaaaaccaacccaggcagcatgactgaaggtggtgataaaggtacaatcgatggtacgtcgctgaaacgtctgctgatgttacgcgatagtgtcctggacaacacgtatttgacgggtcgtgcccgtcgtaaaaacattccgaaaccgcagggcgggacccgcccgctgggtattccgacctttcgcgatcgcatcgtacaagaagtgattcgttctatcttggaaactatctacgaaccggtttttcataaaacaagccatgggtttcgtccaggcctgtcacagcacacagccctgcgcgatattcgcaaaaacttccgtggcgcgtcttggttcgtcgaaggcgatatctctaagtgttttgataaagtggatcataccattctgatccgcctgctgcgcaaacggattgctgacgagaagtttctgagtttaattaaaaagatcctggtgaacatcgtaaaagaggaagataacaccgaaacggtatcgatcatcggcaccccgcagggcggcatttgctctccgctgctgtccaatgtctatctccatgaattcgatttgttcatggagaatcttaaggaaaattacgacaccggtactcatcgccgtcgtaatccggagtatgatcgccgttaccgcaaaggtggcgttcaagaagcacgtaaagtgtcctacggagccccgaatgacccgtattttcgtcgtttaggttacgtccgttatgccgacgattttctgatcgggattattggccccattcgggaagcgcgtgaaattcgtgagcaaattcgccagttcctgaaagacacgctgaacctggaactgaacatggaaaaaacgaagattagcaacccgagttcacataaaatcaagtttctgggttatgttctgggtaaaagtggccgcaatgcgtatacatatattcgtaagtatcagggtaccaaacgtaaaatccgcgttatccgtggcggatcgccgtatctgaaagtcgacacccagaaagtaattaaagccctcgcacagaaaggcttctgtgatggcaaaggttttcctaaacctaatttctattatctgccagagccgcaaacgaccgtgattcggaaatacactcagatcttacgcggtttagaacgttactaccatctggcggacaacaagcggcaggccatctccaagttcaattatatcttgcgctatagcgcggcgaaactgttcgcggcgaagtacaaactgaaaagtatgagcaaagtatttgcactcggcggcaaagacctttcaaagcccattaaaagtaaaaatgcgattggcattacggactcagccttggcggaaatggaagagactgtgaccaataaaccgtcacgtcgtcgcacccaaactctgaaaggcttgccttttaccaagtatagcactatcagtaaaccggacattggagtgttcacgaagtataagaacaatcacccgttctcgaatcctctggaatccttaacctggcgcacgattcgcggggtggatgctttcaaactgccatgcgcgatttgtggagctgaaaacaacgttgaaatgcaccatatccgtcagcttaaaaacctgaaagggaaagatttgatcgaaaaaaagatgatttccgcaatgcgcaaacagattccgttatgtcgtaaacatcatttggcagcccacggaaaaaaaatgtataaatga

SEQ ID NO: 261 - DNA, 2520 bp, synthetic construct
  source 1..2520: mol_type = other DNA
atggctagcgcatggagtcatcctcaattcgaaaaatccggaatgcatattattcaggatttggaagatcgtcataaccacctgaacaataccaacttgaaaagctctatctccatgtggtatgaacgctggttcttatctaccaacgccaaggacattggcaccctgtacctgatgtttgctctgttctctggcttattaggaactgcttttagcgtactggtgcgtcgctgcgccaagctgttattaaacgatccgtttatccttcacagctcgaatatgttgacgaccagtggcctggttgggctcgaacgtgtgcccatgaatattgcatgtctttctaaagcattaagcatctggaaccaggtgtgggaaagcatgcgtgtggtggtccccatggttaaaacgaccctgttcaaactctatctgaaaggtaccagccggaaaggctccaaactggcgtggaaccggttatgcatcctgatcgagattatgtacgtgcgcattttaatccgctgtaacattacccagatcacctgcagcaataaacgcgaagaaggtgaaccgaaaggaactattggcaataactatgaactgcgcgatcatctccgtgggcgctcgtcactgctgtatggcgatggggatttcgtcgtgggtggtaaaaccccgaaaggcgtccgtatgtttagctcgaaaggcgtgaaagaaggttctggggtgcgtccggacctgaaccaatccgaattgccaaataagtttacgaaacttatcgatatctcctcaaacaaagtaaacaacatgaagttcaacgacctgtatacgctgatgttcaacatgaagatgtacgaggtcgcctaccacaaactgaaatcaaaccctggcaatatgtcgcctgggattgaccaaatcaccttagatggcatcagtcaggaagtatttcaaaacatcatcctgaccatgaaggatgagagctttaagttcaaaccaggtcgtcgcgttgatattcctaaagctaatggaaaaacacgtcctttaactgtcgcaagcccacgtgataaaattgttcaggaagtgatgcgcatgattctcgaagccgtctttgaaccgacttttagtaacaattctcatggtttccgtccgaatcgttcgtgtcattcggcactgcgtcaagtcaaaacacagtttggtggcgcgagtttttttattgagggtgacatctcgaagtgcttcgattctttcgaccacgataaactgattgagttaattcgggaacgcattagcgacgaacgctttattcgtctgatctggaaatcgttgaaagccggctatgtacagtttcatcgtacgaaactctcaattattgggacgccgcaaggttccatcatcagcccgattctgagcaacatctaccttaataaactggacctgttcatggacaaacttaaagacgatttcgatcaaggcaaaagtgccaaaattaatccaatctacaaaagtctggactattatcgtcaaaaagcgctcaaagcgaatgaccagctgggtgcgctgaaatatctgaaagagatgcagaaaattcgcgcgcgccttccgaaagatgataattttaaacgcttgtattacgtgcgttatgcggatgactggatcatggccatccgcggaccgctctcagagacgactcggatcttggagagcacccgcgaattcttgcgcaaggagctcaacctggatctttcgaaagaaaagacgctcatcacaaacccccataaagataccgcgatgttcctgggcacccagattcgtatttctaatcacacatatttttatcgcggaccaaacggccagaccatccgtgcggtatctcagttaatttttaccgccccgattgatcgtatccagaagaaactggcagatgcaggtttttgggataacgcgaataaacgctccgtgccgcggatgctttggtaccacgagaataaagacgcgattatcatcctgtacaatagtgtcattcgcggctatctgaattactactcttttgtttcaaacttcggtcgtctggctgcgactgttgaatggattctcaaatcaagttgcacgcaattgttagccgcgaagtttaaactggggacgacactgaaagttattgacaagtttggcgaagacctgaaaggctcggacaatatcgcactgttgaagcctagctatcggaagaatacctgggatttcaagctgaacaacagctacgtgaacctgaaggcgctgtatgctaaaggtattagcaaagcctcactggatggtctggtatgctccaagtgtgaaagtgatgttcaggttgaaatgcaccatattcgtaaacttgctgatttgaatccgaaacttagcgaaattgatcgtattatggcatccaaaaaacgcaaacagattccgttgtgtcgtgcctgccacattgatcatcataaacgctcctttctggatcgtactcgttccaagagtctgattcgcaaaatcattaaatga

SEQ ID NO: 262 - DNA, 2127 bp, synthetic construct
  source 1..2127: mol_type = other DNA
atggctagcgcatggagtcatcctcaattcgaaaaatccggaatgcgcgttgaaaaaaaccaatatcaggagctctcgctgacggccattatcattcgtgacgtcattagtatgactaaaggcgttttacgtgtgaatatcccggttgtcactgtcaccgtcgggttacccaaaagtcgtaaacgctatggtaatggtggcttaattgtagcaggcatcaaaacgcaagtgttttcgaatacgtcaaaggttatgttccgtgagtgcgaagtaacccagcgccgcggtttaacgacatcgaatctcgttatgggtcataagaaattagtacaggaccttaacaataacttctacaaagacaaaatctgcaacccaacgaagctgatccaagcctatgaattggtgtcgagcaataaaggctccaacaccaaaggtatcgatagcgaaacactggacagctactccaaggacactattcactcagtatccaaaagtttgaaagatcactcgttcaagtttaaacccattcgtcgcgtcgaaattgccaaaagcaacggcggatcacgtaaactgggtatcccttcaccgcgcgataaagttgtgcagaaagttatggccatggcgttggaagagatctatgagccaaagtttagcaacagttcccacggctttcgtcctaaacgtggaacccattccgctctgaaaagcgtcacccggtggtctggtacgaagtggttcattgaaggggacatctcaacttgctttgataccctcgaccatcatatcctcgaaacgctgctgaagaaagaaattagttcgaaaccgttcatcgatctgtactggaaggccgtgaaaagtcactatattaatcccgtcaataaggtagaagaattctctaacgtgggggtaccgcaagggggcgtactgtctccgattttatccaatatctaccttcatgagctcgataagttcatgcagacgaaaattgaggaaagtaagaagtcgggtccgaccagcatcgacaatccgcattacaagaaggtgcataccaaaattagcaacatgcgtcagtacttttctccaacctatcgccgtaatcgctctctgaccaaggaacaggagcaggaacgtctgaaagaaattctgaaattggagaaagtgcgcaccaaactgagctcgacaattcaaggcccgggctatcgcgtttattacgtccgttacgccgatgattttctgattggaatcaatggtccgcggcgtattggtgaaaaattaaaacaggaactgcaaaccttcctgctgaacgaactgaaactcacacttaacctggagaaaactaaagttactcgcagcgatcatggtgcttgttttctgggggcgcgcctgaaacgtcacgcatcccgcaccaatgatcagaaacgccgtacgtcatccgtgacgcgcacaggtcgtaaagtgcgtgcgcgtgtgccacagggaaatatcatcgcgttagcgccgctggaacaccttattcggaaactgcaatcccagggcatctgcaaaactcgcaacctgaaaaaacacgacgtgattcctacccgtaaaaccgcttggaccaacctgaatctcgtgaccatcgtccagaaatataacaacgtgtggcagggcctgttgaactattacagctttgcgtacaatcgttgtcaattgaactggattcagtatctgttacatcacagcctggcatgtacctttatgaataagctgaaactgaactcacgtcgccaggtcttcaaaaaatacggcaaaaccattcaggtgaaagatgaatctggcaaacttgttgcgttcaaacttgtgaaaagtcttccgcgcattgggaaattttcgaacaagattctgcctagcggctttgagacgtttaagtatagcttgcgcacacaaagcgtttttgataaagcttgcaaaatttgtggaaccaaacgtaacgttgaaatgcatcatcggcggccgctgaaagcacataaaacggataacactttgaaatctattcaaatcaaccagtctcgtaaacagattccattgtgtgcaagttgccaccagcgtgtgcataatggtctgtatgatggcccgggcatctattga

SEQ ID NO: 263 - DNA, 1848 bp, synthetic construct
  source 1..1848: mol_type = other DNA
atggctagcgcatggagtcatcctcaattcgaaaaatccggaatgcaggaaatcgagacagtattgaacgtaattcagaaccgtggcaaacagggtaaaagtctggaacgcctgtaccgccagttgttcaaagaagagctgtacgaaaaagcctacgccgaaatccatgcaaacgaaggggcgattacgaaaggtagtagcaacgatacgctggatggaatgtcccaaaagcgtatcgcggaaatcattcaaaaagtgcgtaccaccacataccgctggaatccggtacgtcgcacctatattacgaacgaagatggacgcaaacggccgctgggtattccgtctggggatgacaaactgttgcaggctgcgatgaaactgcttttggaagcatattatgagccacagttcagtaaacgctcgcatggtttccgcccgggccgtggctgccataccgccttaaaacaaatccgcgaatcccatcgtgacacatcctggttcattgaaggcgatattaaaggctgttttgataatatcgaccacgaaactctgctcggcatcatggaagagaaaatccgggaccagcgttttcttaacctggtggaataccttatgaaagcggggtacatggaagattggaagtggtatggaacctattcaggtacgcctcagggcggcatcatcagcccccttttggcaaatgtctatttggacacttttgataagtgggtggaagaggagttgctgcctcactataactttggtagtcagaaggagaaaggccgtaaacgtaatccggaatatcgtcattatgaatataaacgtagccaagctaagaaaatgggcgatgttgaggcgtatgagcgctacgggaaaatgatgaagaacgtcccgtcgattatcgatgacgatagctaccgcaaacttgaatacattcgctatgccgacgactttctgctgtcttttgccggacccaaaaaggaagcagaagagattcgcgagcggatctctgagtatctggaacgcgaactgaacctcgagctctcaatcgaaaaaaccttaattacgcacgcgcggaatgataaagctcgttttctgggttatgatctgtgcgtcatgcagtctgatgaacgccgtacggcgaacggtacgatctggctcggagttcctcgtgaagtgcgccgtaaagcaatgcgcaagtacacgaagaaaggtaaagccgtgcatcgcccagaattactgttaaactcagactatgatattgttgcgcgttttcaggcggaatatcgtggcctggttcagtattaccagatggcccataacgtacaccgcttacaagaagtagagtgggtgaccgggacctcactcctgaaaacgctggctggcaaacacaaaacctcggtcaataagattgtcaaaaaacacaagagcacccgtactgttaatggtaaaacctacaaagtcttcgaagcgcgcgcagaacgtaaagggaaagagccgttaaccactcattacggcgccgttccactgatccggaaaccagaagcttccattacagatcgtattgttaccctgggcaaaggtcgggtggaactcttacaacgtctgagcaacgatgaatgtgaaatgtgcggcgagaaaggtaacattgaagtccatcacgtgcgtaaacttcgtgatgtgaataaaccgggccgcaaaaataagccggcatgggtgcaccgcatgagcgcgctgcgtcgtaaaactctgatgacctgcgttaattgtcatgacgctattcatgccggtaaacatcgctcggagtgggacaattggaagattgtgctggaaagccgtgtgcgctga

SEQ ID NO: 264 - DNA, 1818 bp, synthetic construct
  source 1..1818: mol_type = other DNA
atggctagcgcatggagtcatcctcaattcgaaaaatccggaatgcagagtgccgaggtggtgcttggtgtattacgtgaacgtggccgtaagggattaccttgtgaacaactgtatcgccagatgttcaataaagacttgtacctgctggcctatgggaacatctactcgaacagcggcgcgatgacaccaggtgcttcagaagaaaccgctgatggcatgagtgaagaaaaaattgaacaaattgttgaagcgatgcgttgcgaacgttatcgctttgcgcccgctcgtcgcacctatattccgaagaaaaatggaaaactgcgccccctcgggctgccatcctggtctgacaaactggttggcgaggtggtacgcttactcctggaagcgtactatgagccgggtttttctgatctttcgcatggttttcgtaaacgccgtggttgccataccgccctgcggaaggttcacgatacgtggaccggcaccgtgtggtttattgaaggcgatatcagtgattgcttcggcagcctgtcccatgaaattctgctggggatcttggctgaaaaaatccacgaccaacgttttctgcgtttgatccgcaacatgctgaaagcaggctatcttgaagattgggaataccgcgaaacgctgagtggctgcccgcagggtggtgttgtgagccctattttgtctaatatctatcttcataaactggatgagttcgttgagcaggagctcatcccgcagtatacacgtggtacgggccgcaaagtaaacccagtctataaacgtctgcatcgtcatatgacctcggcacgcctgcgcggggaccgggcagctgtccgggatctgaaaaaacagctccgcgcaatcccgtatggggatcctatggatccgggttaccgccgcttaaagtatattcggtacgccgatgatcacattttaggtttcattggcccaaaagccgaggcggaacaaattaaagcacggctggcgaagttcttacgcgagacgctgggtctggagttgaaccagcaaaaaaccctgatcactcacgcacgctcccaaccggcccgttttctgggttaccacgtgcgtgtgcagcattgtaacaccaaaattaccggcggccagcgtagcgccaacgggaatatcgcactgcgcgtgccgccggacgtgatccgttctcagtgcgcccgctaccggaaacatggtaaaccttggtatcgctcccgtctgcagaaccttgacgattatgacatcgtccgtacatacggcgccgagtaccgtggcgttattaattactatttgttagcccaggatgtgtcacgcctgcatgaccttcagtggaatgcggaaacatcgatgctgaaaaccctggcattaaagcaccgttcaactgtaagcaagatggcggcgcgttataaagcgaaaatcgaaactagcgatggcctgcgtacgtgttttgaagcgcgtaaacatcgcgaaggccgcaaagaccttgtcgcacgttttgggggtattattttgcgccagaatcgtcgtgcggtcattacggatcctgctagcggtccgccgctctacccccgtaaagagctcacccggcgtttacgtaagcgcgaatgtgaattgtgcgaaactggaacgacggttgcggttcaccaagtcactggtctgaaagatctgggaaaaccgggcgctggacagccggcttgggccaccctgatggccaagatgcgccgtaaaaccctcattgtatgcgcgccatgtcatgactggattcatgccaacccggtggcgcacgcagcgtga

SEQ ID NO: 265 - DNA, 1827 bp, synthetic construct
  source 1..1827: mol_type = other DNA
atggctagcgcatggagtcatcctcaattcgaaaaatccggaatgaaacctactagcgaaatcctggaacgtatgaatcgcaactctggcgaacatccggaaggcgtgtacacccgtctctatcgttatcttttgcgcgaagatatctacatgacagcgtacaataatctgtatgccaacaatggcgcgggtaccaaaggcgtcgatgacgacacggccgatggtttcagcgttgaatacgttcagcagattatcgcagagctgaaagcgttaaactacagccccaaaccggttcgccgtacctaccttaaaaagaaaaatggaaaacttcgccccttaggtattccgtcttttaaagataaactggtgcaagacgcggtgcgccaaatccttgaatccatctatgaaccaattttttccgatttttcgcatggttttcgtccagatcgttcgtgtcacacggcactgaaacaagcgtccaagtattttcgcggcacgaagtggtttattgaaggggacattaaaggatgcttcgacaacattgatcatacagtattacttaacctgttgagtgagaagatcaaagactccaaatttgtaactttaattgggaagttcttaaaagcaggatatatggagtcatgggaatatcataaaacctactcgggtacgccgcagggcggcattttgagcccgatcctggctaacatctatttccacgaattggataagaaagtggaacagctgcgtgccgattttagtcaaccaaatcctaaaagttgttccctggaatatggtcgcattcgtcgggaaatcttgaaaaaacgcaaacagtatggtgaattgactgatgatacgcagaaaaaatcattactgcgcgagatccataaactggaaaccgagatgcgtaaactgccttataaagacgcaactggccgcaaaattgtatatgttcgttatgctgatgactttctgatcggcgtttctggctcacgcaaagattgcgaaaaaatcaagcaggagctgaccgcctttattagcgagaagttaaaattggagctcagcgatgaaaaaacgcgtatcacccacagcagcgaaaacgctcgttttctgggttacgacatcaatgtgcggcgtaacaaccaaacgaaacgtaccgcgaaaggcaccgtgcaacgtaccctgaaccagagcgtggaactgctggtaccgtttgaaaaaattgagcaattcatgtatcagcgtgaaattgtgatccaagccaaggacggatcgctgattccgtggcagcgcgacgccatggcggggctgaccgatctggaagttctggatacatacaactctcagacccgcggtatttgcaactactactctttagcaagtaacttctcaaagctcacatatttcgtgtatctgatggagtacagctgcctgaagaccctcgctaaaaaacataagacacgtatttcagcgatcaaaaaaatgtaccagtgtgggtccagttggggtattccgtatgaaacgaaaagttgcaaaaaacgcatgatgattatcaagttctcggatctgaaaaagggggtcgtctatcagaacgccgatattatcaaacatcacattcacttcaccaatcactcgtctctcgaggaccgcctgcgggcgaatcagtgtgaactctgtggcgcaactgatgttccgcttgaagtccaccatatcaataaggtcaaaaacctgaatggtaaagaacagtgggagaaagccatgattgcgcgtaaacggaaaacgctgattgtctgcaaaaattgccatatcgctattcatcacagctga

SEQ ID NO: 266 - DNA, 1833 bp, synthetic construct
  source 1..1833: mol_type = other DNA
atggctagcgcatggagtcatcctcaattcgaaaaatccggaatgaaaccaactatggaaatcttagctagtattaaagagaactctagcaaaaattctgaagaggtgtttacacgcttataccgctaccttctgcgccaggatatttggtttgaagcatataagaacctgtatgcaaattcgggagccgcgacgaacggtgtcgataacgataccgccgacggattctccaaagagaaaattgacaaaatcattgcgtcactggcggacgaaacatataaaccgaagccggcccgtcgcacctatatcaaaaaagcaaatggtaaaatgcgtccgttggggatcccaacgtttaccgataaacttgtccaggaagtcttacgtatggtgatggaagccgtgtatgaaccggtgtttctgaactgttcgcacggctttcgcccgaaacgttcgtgtcacaccgccctgtccactctgaaaaaagaattcacaggtgcaaagtggtttgttgaaggcgatattaaaggctgctttgacaatatcgaccatgcagtactcgtcggcttcattaatcagaaaattaaagatgcgcgcctgattaagctgatctaccggttcctgaaagcaggctttgtggaaaactggcaatataacaacacttacagcggcactccgcagggcgggatcatctctcctcttctggccaatatctatcttcatgagctggacaagttcgtgatgactctgaaatcggaatttgataagccaaatgaaaccgttcgtaccaaagagtacaaccgcttattcacccaacgtgttaaactgaagaaactgattgactgtgcggatggtgaagaaaaacaggatctgctgaaacaatataaacaggttcgtgcggaaatgatgaaaacgccgtacacgcctcaggatgataaaaagatcaagtatatccgttacgctgacgattttctgattgcggttaaagggaaccgtgaagactgcatggaaattaagcgcaaactcgcggaattcattagtgggaccttgaaaatggaactgagcgatgaaaaaacgttaattactcactcctcggagaaagctcgctttcttgggtatgatgtttcaatccgtcgtaacagcagcattaaacctcatggcaaaggtcgccccacgcagcggactctgaacaataaggtagaactgctgattccgaaggacaaaattagtaagttcctgtttagcaagggcatcgtgcgtcaaaaaaagtgtgacgaaatgtttccgatttcccgggtgcccttgcgcaacagcaccgatctggagattatcacgatctttaatgcagagttgcgcggaatctgcaactactactcattggcgtcaaacttcagcgatctcaattattttaactaccttatggagtatagttgcttgaaaaccctggcgaccaaacacaaaacccggatcacaaaaattaaagagaaattcaaagatggtaaaggttcctgggcaatcccatatgaaacaaaaagtggcaaaaaattgatgtattttgccaagtacaccaattgcaagggtgcgaatgccaccgataccgtcacgaaagctgctgtaacgattggctataatcgtaacaccttcgataaacgtctcaatgccgatatctgcgagttatgtggtaaaacgggagcgggcaactacgaaattcaccacattcataaagtaaaagacctcaaaggtaaagaattatgggagcgcgctatgatctctaaaaagcgtaaaaccctggtggtttgccatcaatgtcatcagaatattcatcatccgaaatga

SEQ ID NO: 267 - DNA, 1860 bp, synthetic construct
  source 1..1860: mol_type = other DNA
atggccaaaggcggcagctacattaacagcatcctgctgatggagaatgttaagtatattatgacgaacccagaaatcatcctgaataaccttgtaaaacactcaaaaatttctggttacaaattcgagcgcttgtaccggatcctgttcaacgagcaaatgttttatcaggcctatcagcgcattgcgtccaaaaaaggaaatatgacctcgggtacggacggcaaaacggtggatggtatgtcaattgaacgcattgagcgccttattgcttccctgcgtgatgaaacctataaaccgcatccggcaaaacgcgtgtatatccctaaaaaaaatgggaaaaaacgtccgctgggcattccatcgtttgaagataaacttgttcaggaagttgtccgcatgatcctggaagcagtgtacgaaggttattttgaaagcacatctcacggtttccgcccccgcaaaagttgccagacggccttgacctcgattcgcaacacatttttaggcactaagtggtttattgaaggcgatattaaaggttttttcgacaacatcgatcacaatgtgctgatcgaaactttgcgtgaacggattaaagacgatcgttttctgcgtttaattcgcaagttcctgaacgccgggtatatcgaagactggaagttcaacaatacctattctggtacaccacaagggggcattatctcgccgatcctcgcgaatatctaccttgaccgttttgacaagtacatcgcagagtacatccagaaatttgatacaggtaagacccgtccgaaaaatcgtgagtaccgtatctatagcgatcgtaaacggcgcttactcgcgaagtttaatgccgaaaccgacgcggataaacgtgaagaaatggctcagcgtttaaaggaatattctcgtcttatgtatgaacatccgtctgtggacgaaatgacgcccacctataagcgtatgaaatatgtacgctacgctgatgacttcctgattggagtctgcgggagtaaagcggagtgcgagatcattaaaaacgatattgcgatgttcatgaaagagaagttaaagctggagctgagcgacgagaaaacgttgatcactaatgccaaagatcgggctctgtttctcggttatgaaatcaccgtgcgtcaaagccaatcgactaaacgggataaaaatggcatgctgaaacgcatgttcaatggtaaagtaattctgctgctcccgcgcgaagtcgcgcgcaaacgtctgttatcctataacgcgatgaccatcattcaggtgaacggcaaagaagattggaaaccaaaaagtcgcggcgcaatgaacaactgtaaacctgaagatatcttggctaaagttaactcagagatccgtggtttctacaattattatgctattgcgaacaatattagcacgctgggaaagcgttttggctacgttatgagttatagcttctactgtaccctggcccagaagttaaacatttcctaccccaaagtcattaaaaaatatcgtgaaggcaaagattgtgtaattcgctataccgatgcgaaaggtcgtgaacgctgccgtatgttgtacaatggcggatttcaacagaaagaaccgacggcggatgccaagtgtgacaatcttccgaacccgtttgttatttcatccccgagcctggttgaacgcctgaaagccgaggtgtgtgaattgtgcggcgcaaaagggaaaactgtcatgcatcatgtgcgtacgctcaagaccctgaccgaaaacaccgcgtgggaacgtgcaatgctgcagatgcatcgtaaaagtctggcagtctgccctaactgctacgcacacattcatgacgat

SEQ ID NO: 268 - DNA, 2925 bp, synthetic construct
  source 1..2925: mol_type = other DNA
atgttagaagttaaagtttccaaccggttgacttgtctgaccactatctctggccctgccaatgttgtctgtcccatcgactcaggcatcctgttccaccgttattatgtttttatttctatcaataccccgttacattcaacaccgatgcgcgtgtgttcgttttttaatgcatgcagtaagaaacgtagtaattgctttaaagcggcaattcgtggattttccagcgatctttctagctccgaagataaagatcgcacagtcgttagcgtgagcagcaaagagtgtttcctgccggttccgtcgcgcaaagcggatatgtcgttgtctgtacagtccattccgagcaaactgtcaaataatcacgtggaaggaagcaccgacgtggtcgactcgttacgccaactgaaaccagaaaaagatggtatctacacccgtattaccacccggtttctggccaatcctgagttcctgaaacttgcgtatgctcatatcaaaaataaagaagggaacatgaccagtggtggctctaactcaaacatcattttggatggcatcagccagaagtggtttgaagatactgcccttcgcctgaagaatggcacgtatgagttcagcacctctcgtaaaattaacatcccgaaaaaaggctcgctgaaattgcgccccttaaccattggtaatttgcgtgacaaaattatccagaaagcgattcaactggtgttggaagaaatctatgaaaacaaggaaaaaatctttagtgatgccagccatggatttcgcccgaatcgctcatgccatacggcactgcaacaaattaaaaacgaatggaccgccattccatggtttatctccattgacattaaggatgccttcggaaccattaatcgcgacatcttaatcagttgcctgaaagttaaaatccgtgaccagcgtttgttcgagattttacttaagatgttacaagcggatattatttccattaacggtatctggaaagaattttatggcgtaccgcagggcaatattttatccccgatcctggccaacatctatttccacgacctggatgtttacattgataaaaaaatcattaaccgctacaaaaagggcacaaaagcagcgcgctgtctggattaccagcgtgctgtttcttttactaatgaggaaaaaaaagcaagtctccaaaaacgcaagcagctggctcgtcggaaacgccgtgacgctcataaagctggtcttcgttataccaaaattgatggtagctttattcgtgtaaagtacgtccgctatgcggatgatttcctgatcggggtgcgtggcccgaaaaccttggtcctgaagattttccggtctgtcatcttctttctgaaatcgacactccagcttaacctgaacgaggagaaaagtaaaatcattgatagctttagcaacaagatcagcttcttgggtatgctgattcataacgtgtcaacgaaaaaactgccttttcgcaaaagtcgtgcgttacagaataaaaaacgtaagctgacgcgtgtcctgctgcgcgcggatgcattagaaaatcagcgcactaaaaaactgaaagatgagtgcctgaagttgctccgtaatagttataagtcgtcccgcaaagatcggaagccgttgaaagaagacttcatctctttgattaaaggttctcctgtatttggtgacgttatcaaaaactcaaaccgtgcaatctaccgtgagttcatccaaagccttctcctggtgtccgatattcaggaaaaccataccctcaaagattttctgaacctgtgggaaaaggagctgtcattagacacggaaaagttcaaaaacgagaattctcctacgcgtccgattacgaaaagtgaaaccatccgtcgcattgtagagattctgaaagtgcagcacaaccttccagcacaggaagtgcagtggtttcagctgttcaaaggggcgaacaaagcccgcgggtcggcatggaaaccggtgtggattgacaaattttcactgagcaaaaacgctgtgtccaaactgaaattacctgtgaataatatctatcacgtaaagtataacgtggagaacattcgcctggtcattgaagatcttctgctgcaagcggaacaacgcccgagcaaaacctacattgatcatattccaaacaacaatgcgaaaagtgttcgtcagacgtgggatgaagaaggcgtctttacgtctttgccgccacagattaacagcgatacgtcggaaatctataaacgcttaaaagaagcatccatcattaattcgaaaaaaaagcccatttgtaagaattcgctcctggctgcggaagcgtggctcatcatttcatattacaataccctggcgcacggtctgctcagctactttcgctgcgttgataatttcaatacgatcaaaaaaatcgtcacttaccaccttcgttatagcctgttacacaccttggcgcataaacataagtgtagtatcaagaaggttctggagatctactcgaaagagattaaaaccaatggccgtcagggcaaggtcgtgtcgtttattaactccatcgccgtgacaaaccttaaaaaggactttctcttcaaagacctgcgtaacccgtacagcaacctcacgaaaagttatatttcactccagcggggtgctatttccgccaataagtgcgccgtaaaaaactgcgtggaaacagacaatattgaagtgcatcacgtgcaaaaactgttccggaacattgaccgtactgggaaagtagtgattcagggtattgccaaaaaactgtcaggccgtctggccatggaaagcgcgctgaaacggaaacaaattccgttttgcccaaaacaccataaagattggcataacggggttattagcaaaattgatctggatgaaccctgggtc

SEQ ID NO: 269 - DNA, 2562 bp, synthetic construct
  source 1..2562: mol_type = other DNA
atgcgtgatgttaataatggctggctcgtgcgctatctgcacagcaatactgcttcagcattcttctttctggtgtacctgcacatcggtcgtggcatgtactatgggagctatcgtgcgcctcgtaccctggtatgggctatcggtacggttagcgccccgaaaggccgctactttggtagtgtccctcgccgcctgttcaaatccggtattgatagtattcagttcgaatatcgcatgccattaccgggtatgtggctgattaccctgtcctttggtattgcgggtggtcgttgctctatggtccgtatcctgttcaacctgcagctgacggcatcaggcatctggcatggtaaagataatgaattagatacaatcaaacatcaccgtccgcgtggtaatgatcataaccgttcctgccaccattttgacggcgtattacgtgttatttggctggcgcatggcgagacgaccaccccctcagcaacatcccgtcgcttcaactgctgtaagtgcctgaaccaaaaagtcaccaatcttagcctgcttcgggatcgtacggcatatgcaattggcacgcgtcgtcgctcttttcatacgcgtggtcgcgtcgaacggccacagcaggactccaaaggctcctcttttaatcaggagattctggaaacgaaagtgctcgagcagcgcaaggcggcgggcctcaccagcagtaaagtacgcaaaggcgggaaacgcgcagcgctcgtgacactggtgcgcaaagaacttcaattgtacctggataaacgcggatcgtataatggcctgatcaatattctgaaaaacccggagtaccttgtagcttgttatgagtcaattcgcggcaaaccgggaaacatgactaaaggttccaccaaggaaacgttagatggtttaacttgggaatggtttgtcaaacttggtgaatcattagccaaaggcaagtttgactttaccccagcacgtcgcgtcatgattccgaaagctaatggaaaactgcgtccgctgggcattaattcgccgcgcgaaaaaatcgtccagaaagccctggcggttattatggagcagatttgggaacgcatttttctgaactcgtctcacggctttcgcccgaaccgttccatccattctgcactgaaagaattatatttggaagggggtaactacaactgggtaattcagggggacattgaaaaatgctttgatgccatcccacacagtgtcatcatgaaccgtgtacagaaaattatcaagtgcaaacgcacgctcgagctgattaaaaagtcgctcgatgccggctacatcgatcccgatactaaaaaaacggtgaatagtgatctgggaactccgcaaggaagcgtgctgtcgcccttgctgtgtaatattgtgttacatgacttcgatgcgttcatgtcatcgatgcgcgaagaatataactttggtgaaaaacgtcgtccaaaccccgattacgtgaaactgaatagtaaacgtcggtatatccgcgatattcgggaacggcgtaaaattcttcgtgaaatgcgtcagctgctggctagcgatcctatggacccgaatttcaaacggctgaagtatatccgttatgctgatgattttgttatcttaatcatcggcccgctcggcgatgcggaaaagatcaaagaacggattcgtgacttcttattgaacaaatgtgggctgaccctgtcgctggagaagacggtgattagtaatatccagaccgaaggttttaagtttctgggtgcggaatgtcgtcgcgccagcatgaccaaaaatcacgttgtgaaacataaagaccgtacgatccgtgcgacaacccgtctgcgcgttaacattgatctcactaaggtctacaagaagttggtgagcattaaagttgcgacctgggataacaaaaatttgcaggtgccgcgcggtaccgcgaacaacgccttgattaacttctctcatgccgaaatcatttcttggtacaacagcaagatccaggggatccaaaatttctacagcttcgctggcaatcgtaaacgtctgcacttggtgttttggattctggcttcgtcttgcgcactgacattagccaagaaacataaaatgagcagcatgggccaaatcttcaaaaaatttgggcgcaatcttacctgcccagagacagacgttagtctcgttcgcccgtccgcgttagaagccattcatgattacaagtctaacaatgtaccggataaccttgactttctggacgtgacctgggccgccaaacttactgagtcaaacattgggaaaagttgctttttatgtggctccaccaaagacatcgagatgcatcacttgaaaagcgttaaagacgtgaaacaaaagatccgcaacggaaacgcctcgttctcggcgtggaaaggcgcatttttgcgtaagcagatccctctgtgtagctatcaccacgatctttatcatgggggcaaactgaactatgcggatttgaaacaaattagtagcttcaccaaactgcctgacagcccgtcagacaacaaa

SEQ ID NO: 270 - DNA, 1737 bp, synthetic construct
  source 1..1737: mol_type = other DNA
atgaaagaaaaggaagatcgcaaactcttgtccagcaaagatattattagtaaagatattacgtatgagctcctggcaatcatcaagaataaaggcaacaatcggtacggttatcttctgaaattcattagtaacgtcgacgtgttactgtcatcctttgaacatattgtacgtaaagatggttattactcgaagggttctgacaaacagattttaagtaacgttgacattaagtacttcgagaatctttcgcgcgaactgaacagcggatcctataaaccgaatccgtcgcgtcgtgtttatatttctaaacctgatggcagcaaacgcccattaggcatcagctgctctcgtgataaaattgtacaacaagcatgtatgattgccctgtcgtatatctatgagagtatttttttagaaaactcacatggctttcgtccatacaagtcatgtcacacggccatcaactactttaaacttcacttcacgagcaccaagtggatcctgaacattgacctcaagggatgcttcgataatatcaatcaccagaaattgatctcgattatcaatgagaacgttgacgataaaggctttgaaattctgtattggaaaatggtgacagcgggttatatctatcgtggtacccactttaaaaccattgaaaaaggaactccccaagggtcaattctgtctccgattctgtgcaatatctttctgaacaagctggatatctatcttctggacttgaaaaatgaatttgacaaagggaccgaaaaacgcaaaaacaaaagttatcgtaagctggctgtcaaagaagcacgtaaacagttcattacctctcgtgatcagatggataccaactttaaacgccttaactttgttcgctatgcggatgatttcattatcggcattgatggtagtttgagcgacgcgcagctgattggggcgaaagtcgaaaaatttcttaaaggagagctgctgtttgaaatcaaacgcttcaccattaaaaacttttgtcaggaaggtgataactttctcggcttcacgctgaaagggtggacgactaagagtcgtaaaattatcaatacgaaaaaaggcaaacaattggtgaaccatcgcccaaaggtcctgattccgactacgaagattctgaacaaattgcatgaaattggcctcgttaagaaatacagcaaccattttcgtgggaccgcctaccggaaactggtagagcatccgttatacaatattgtggagtattttaattcagtgtatcgcggcatcgcgaattactactgcatcgcctacaatattaacaccctgcgcaacctgaattacattttaaaagtgtcatgctgcctcacaatcgctctgaaaatgaaattattcactgttagcaaggtgctgaaaaagtatggtcggaatgtgacaatcaatgaaaacgatagcaccatcaagttcatttcctaccgtaaactgaagaaaccgtatttcaaaagcatcgaaccgttcaatttggacaacatcatcaaattttttagctatggcttgcggagcaaacttaaaaccaacaaaggctgtgaaaactgtggttcgtccctcaacctgtctctgcaccacttcaatcccgtacgcaatatcaaccctaagctgaaaacattagagaaaatcaaaattaaagtcggtcgccagcagattctgctgtgccgtgaatgtcataataaactgcattccgctaaa

SEQ ID NO: 271 - DNA, 2502 bp, synthetic construct
  source 1..2502: mol_type = other DNA
atgcggaaacataaacgcatccacttcggtgtgttcctcaacatccggagcttaatgatttgcgagtcgagcttattagcaatcacgatgcttctgaccgaccgccgtgcgacggttcggtttctgtggaaattgcgtttgcttattaaccataaccttctgaacagcggtatgtttcaaaataccgaaatcctcacatggcactactcctcaaccgatgctggtgataatagcctgtaccttacaggcgtgagcgatcttgggactgtgaaagcctacccgctgcgtaaagtgaccaatcaggtccagtgggtcattcgcgaaggggaaaccctcgctggtccagtggatcgttcaagcatgccgacgttaacaagctgccaggcgttagcgattcatctggagacagagtcttttgatgctgatcttcccattcctaaggttgaccagctggtgtttaacaaaaaatcgtccgaggcaaagccacacctctcgtttatgccgagcattgcaattcccgttaacctgcaaaaccacaaaaaaaagatgcgccgcgggcgtggcgccgttgtacccaatacgatgggccgtgctctgtgcggcctgagctttacccaggatcgttcgctgtctaccaaaacctttcaaagtgacgtctctcagggtcggatcccaaatactatgattaaacgcctcgaaacgctgtctaagctttttacccacaatcctgacgcccaggcagatggattgatgcgtattctcaaagattcccaaatttgggttgcggcctacatcaaactgaaaaccaacccaggcagcatgactgaaggtggtgataaaggtacaatcgatggtacgtcgctgaaacgtctgctgatgttacgcgatagtgtcctggacaacacgtatttgacgggtcgtgcccgtcgtaaaaacattccgaaaccgcagggcgggacccgcccgctgggtattccgacctttcgcgatcgcatcgtacaagaagtgattcgttctatcttggaaactatctacgaaccggtttttcataaaacaagccatgggtttcgtccaggcctgtcacagcacacagccctgcgcgatattcgcaaaaacttccgtggcgcgtcttggttcgtcgaaggcgatatctctaagtgttttgataaagtggatcataccattctgatccgcctgctgcgcaaacggattgctgacgagaagtttctgagtttaattaaaaagatcctggtgaacatcgtaaaagaggaagataacaccgaaacggtatcgatcatcggcaccccgcagggcggcatttgctctccgctgctgtccaatgtctatctccatgaattcgatttgttcatggagaatcttaaggaaaattacgacaccggtactcatcgccgtcgtaatccggagtatgatcgccgttaccgcaaaggtggcgttcaagaagcacgtaaagtgtcctacggagccccgaatgacccgtattttcgtcgtttaggttacgtccgttatgccgacgattttctgatcgggattattggccccattcgggaagcgcgtgaaattcgtgagcaaattcgccagttcctgaaagacacgctgaacctggaactgaacatggaaaaaacgaagattagcaacccgagttcacataaaatcaagtttctgggttatgttctgggtaaaagtggccgcaatgcgtatacatatattcgtaagtatcagggtaccaaacgtaaaatccgcgttatccgtggcggatcgccgtatctgaaagtcgacacccagaaagtaattaaagccctcgcacagaaaggcttctgtgatggcaaaggttttcctaaacctaatttctattatctgccagagccgcaaacgaccgtgattcggaaatacactcagatcttacgcggtttagaacgttactaccatctggcggacaacaagcggcaggccatctccaagttcaattatatcttgcgctatagcgcggcgaaactgttcgcggcgaagtacaaactgaaaagtatgagcaaagtatttgcactcggcggcaaagacctttcaaagcccattaaaagtaaaaatgcgattggcattacggactcagccttggcggaaatggaagagactgtgaccaataaaccgtcacgtcgtcgcacccaaactctgaaaggcttgccttttaccaagtatagcactatcagtaaaccggacattggagtgttcacgaagtataagaacaatcacccgttctcgaatcctctggaatccttaacctggcgcacgattcgcggggtggatgctttcaaactgccatgcgcgatttgtggagctgaaaacaacgttgaaatgcaccatatccgtcagcttaaaaacctgaaagggaaagatttgatcgaaaaaaagatgatttccgcaatgcgcaaacagattccgttatgtcgtaaacatcatttggcagcccacggaaaaaaaatgtataaa

SEQ ID NO: 272 - DNA, 2475 bp, synthetic construct
  source 1..2475: mol_type = other DNA
atgcatattattcaggatttggaagatcgtcataaccacctgaacaataccaacttgaaaagctctatctccatgtggtatgaacgctggttcttatctaccaacgccaaggacattggcaccctgtacctgatgtttgctctgttctctggcttattaggaactgcttttagcgtactggtgcgtcgctgcgccaagctgttattaaacgatccgtttatccttcacagctcgaatatgttgacgaccagtggcctggttgggctcgaacgtgtgcccatgaatattgcatgtctttctaaagcattaagcatctggaaccaggtgtgggaaagcatgcgtgtggtggtccccatggttaaaacgaccctgttcaaactctatctgaaaggtaccagccggaaaggctccaaactggcgtggaaccggttatgcatcctgatcgagattatgtacgtgcgcattttaatccgctgtaacattacccagatcacctgcagcaataaacgcgaagaaggtgaaccgaaaggaactattggcaataactatgaactgcgcgatcatctccgtgggcgctcgtcactgctgtatggcgatggggatttcgtcgtgggtggtaaaaccccgaaaggcgtccgtatgtttagctcgaaaggcgtgaaagaaggttctggggtgcgtccggacctgaaccaatccgaattgccaaataagtttacgaaacttatcgatatctcctcaaacaaagtaaacaacatgaagttcaacgacctgtatacgctgatgttcaacatgaagatgtacgaggtcgcctaccacaaactgaaatcaaaccctggcaatatgtcgcctgggattgaccaaatcaccttagatggcatcagtcaggaagtatttcaaaacatcatcctgaccatgaaggatgagagctttaagttcaaaccaggtcgtcgcgttgatattcctaaagctaatggaaaaacacgtcctttaactgtcgcaagcccacgtgataaaattgttcaggaagtgatgcgcatgattctcgaagccgtctttgaaccgacttttagtaacaattctcatggtttccgtccgaatcgttcgtgtcattcggcactgcgtcaagtcaaaacacagtttggtggcgcgagtttttttattgagggtgacatctcgaagtgcttcgattctttcgaccacgataaactgattgagttaattcgggaacgcattagcgacgaacgctttattcgtctgatctggaaatcgttgaaagccggctatgtacagtttcatcgtacgaaactctcaattattgggacgccgcaaggttccatcatcagcccgattctgagcaacatctaccttaataaactggacctgttcatggacaaacttaaagacgatttcgatcaaggcaaaagtgccaaaattaatccaatctacaaaagtctggactattatcgtcaaaaagcgctcaaagcgaatgaccagctgggtgcgctgaaatatctgaaagagatgcagaaaattcgcgcgcgccttccgaaagatgataattttaaacgcttgtattacgtgcgttatgcggatgactggatcatggccatccgcggaccgctctcagagacgactcggatcttggagagcacccgcgaattcttgcgcaaggagctcaacctggatctttcgaaagaaaagacgctcatcacaaacccccataaagataccgcgatgttcctgggcacccagattcgtatttctaatcacacatatttttatcgcggaccaaacggccagaccatccgtgcggtatctcagttaatttttaccgccccgattgatcgtatccagaagaaactggcagatgcaggtttttgggataacgcgaataaacgctccgtgccgcggatgctttggtaccacgagaataaagacgcgattatcatcctgtacaatagtgtcattcgcggctatctgaattactactcttttgtttcaaacttcggtcgtctggctgcgactgttgaatggattctcaaatcaagttgcacgcaattgttagccgcgaagtttaaactggggacgacactgaaagttattgacaagtttggcgaagacctgaaaggctcggacaatatcgcactgttgaagcctagctatcggaagaatacctgggatttcaagctgaacaacagctacgtgaacctgaaggcgctgtatgctaaaggtattagcaaagcctcactggatggtctggtatgctccaagtgtgaaagtgatgttcaggttgaaatgcaccatattcgtaaacttgctgatttgaatccgaaacttagcgaaattgatcgtattatggcatccaaaaaacgcaaacagattccgttgtgtcgtgcctgccacattgatcatcataaacgctcctttctggatcgtactcgttccaagagtctgattcgcaaaatcattaaa

SEQ ID NO: 273 - DNA, 2082 bp, synthetic construct
  source 1..2082: mol_type = other DNA
atgcgcgttgaaaaaaaccaatatcaggagctctcgctgacggccattatcattcgtgacgtcattagtatgactaaaggcgttttacgtgtgaatatcccggttgtcactgtcaccgtcgggttacccaaaagtcgtaaacgctatggtaatggtggcttaattgtagcaggcatcaaaacgcaagtgttttcgaatacgtcaaaggttatgttccgtgagtgcgaagtaacccagcgccgcggtttaacgacatcgaatctcgttatgggtcataagaaattagtacaggaccttaacaataacttctacaaagacaaaatctgcaacccaacgaagctgatccaagcctatgaattggtgtcgagcaataaaggctccaacaccaaaggtatcgatagcgaaacactggacagctactccaaggacactattcactcagtatccaaaagtttgaaagatcactcgttcaagtttaaacccattcgtcgcgtcgaaattgccaaaagcaacggcggatcacgtaaactgggtatcccttcaccgcgcgataaagttgtgcagaaagttatggccatggcgttggaagagatctatgagccaaagtttagcaacagttcccacggctttcgtcctaaacgtggaacccattccgctctgaaaagcgtcacccggtggtctggtacgaagtggttcattgaaggggacatctcaacttgctttgataccctcgaccatcatatcctcgaaacgctgctgaagaaagaaattagttcgaaaccgttcatcgatctgtactggaaggccgtgaaaagtcactatattaatcccgtcaataaggtagaagaattctctaacgtgggggtaccgcaagggggcgtactgtctccgattttatccaatatctaccttcatgagctcgataagttcatgcagacgaaaattgaggaaagtaagaagtcgggtccgaccagcatcgacaatccgcattacaagaaggtgcataccaaaattagcaacatgcgtcagtacttttctccaacctatcgccgtaatcgctctctgaccaaggaacaggagcaggaacgtctgaaagaaattctgaaattggagaaagtgcgcaccaaactgagctcgacaattcaaggcccgggctatcgcgtttattacgtccgttacgccgatgattttctgattggaatcaatggtccgcggcgtattggtgaaaaattaaaacaggaactgcaaaccttcctgctgaacgaactgaaactcacacttaacctggagaaaactaaagttactcgcagcgatcatggtgcttgttttctgggggcgcgcctgaaacgtcacgcatcccgcaccaatgatcagaaacgccgtacgtcatccgtgacgcgcacaggtcgtaaagtgcgtgcgcgtgtgccacagggaaatatcatcgcgttagcgccgctggaacaccttattcggaaactgcaatcccagggcatctgcaaaactcgcaacctgaaaaaacacgacgtgattcctacccgtaaaaccgcttggaccaacctgaatctcgtgaccatcgtccagaaatataacaacgtgtggcagggcctgttgaactattacagctttgcgtacaatcgttgtcaattgaactggattcagtatctgttacatcacagcctggcatgtacctttatgaataagctgaaactgaactcacgtcgccaggtcttcaaaaaatacggcaaaaccattcaggtgaaagatgaatctggcaaacttgttgcgttcaaacttgtgaaaagtcttccgcgcattgggaaattttcgaacaagattctgcctagcggctttgagacgtttaagtatagcttgcgcacacaaagcgtttttgataaagcttgcaaaatttgtggaaccaaacgtaacgttgaaatgcatcatcggcggccgctgaaagcacataaaacggataacactttgaaatctattcaaatcaaccagtctcgtaaacagattccattgtgtgcaagttgccaccagcgtgtgcataatggtctgtatgatggcccgggcatctat

SEQ ID NO: 274 - DNA, 1803 bp, synthetic construct
  source 1..1803: mol_type = other DNA
atgcaggaaatcgagacagtattgaacgtaattcagaaccgtggcaaacagggtaaaagtctggaacgcctgtaccgccagttgttcaaagaagagctgtacgaaaaagcctacgccgaaatccatgcaaacgaaggggcgattacgaaaggtagtagcaacgatacgctggatggaatgtcccaaaagcgtatcgcggaaatcattcaaaaagtgcgtaccaccacataccgctggaatccggtacgtcgcacctatattacgaacgaagatggacgcaaacggccgctgggtattccgtctggggatgacaaactgttgcaggctgcgatgaaactgcttttggaagcatattatgagccacagttcagtaaacgctcgcatggtttccgcccgggccgtggctgccataccgccttaaaacaaatccgcgaatcccatcgtgacacatcctggttcattgaaggcgatattaaaggctgttttgataatatcgaccacgaaactctgctcggcatcatggaagagaaaatccgggaccagcgttttcttaacctggtggaataccttatgaaagcggggtacatggaagattggaagtggtatggaacctattcaggtacgcctcagggcggcatcatcagcccccttttggcaaatgtctatttggacacttttgataagtgggtggaagaggagttgctgcctcactataactttggtagtcagaaggagaaaggccgtaaacgtaatccggaatatcgtcattatgaatataaacgtagccaagctaagaaaatgggcgatgttgaggcgtatgagcgctacgggaaaatgatgaagaacgtcccgtcgattatcgatgacgatagctaccgcaaacttgaatacattcgctatgccgacgactttctgctgtcttttgccggacccaaaaaggaagcagaagagattcgcgagcggatctctgagtatctggaacgcgaactgaacctcgagctctcaatcgaaaaaaccttaattacgcacgcgcggaatgataaagctcgttttctgggttatgatctgtgcgtcatgcagtctgatgaacgccgtacggcgaacggtacgatctggctcggagttcctcgtgaagtgcgccgtaaagcaatgcgcaagtacacgaagaaaggtaaagccgtgcatcgcccagaattactgttaaactcagactatgatattgttgcgcgttttcaggcggaatatcgtggcctggttcagtattaccagatggcccataacgtacaccgcttacaagaagtagagtgggtgaccgggacctcactcctgaaaacgctggctggcaaacacaaaacctcggtcaataagattgtcaaaaaacacaagagcacccgtactgttaatggtaaaacctacaaagtcttcgaagcgcgcgcagaacgtaaagggaaagagccgttaaccactcattacggcgccgttccactgatccggaaaccagaagcttccattacagatcgtattgttaccctgggcaaaggtcgggtggaactcttacaacgtctgagcaacgatgaatgtgaaatgtgcggcgagaaaggtaacattgaagtccatcacgtgcgtaaacttcgtgatgtgaataaaccgggccgcaaaaataagccggcatgggtgcaccgcatgagcgcgctgcgtcgtaaaactctgatgacctgcgttaattgtcatgacgctattcatgccggtaaacatcgctcggagtgggacaattggaagattgtgctggaaagccgtgtgcgc

SEQ ID NO: 275 - DNA, 1773 bp, synthetic construct
  source 1..1773: mol_type = other DNA
atgcagagtgccgaggtggtgcttggtgtattacgtgaacgtggccgtaagggattaccttgtgaacaactgtatcgccagatgttcaataaagacttgtacctgctggcctatgggaacatctactcgaacagcggcgcgatgacaccaggtgcttcagaagaaaccgctgatggcatgagtgaagaaaaaattgaacaaattgttgaagcgatgcgttgcgaacgttatcgctttgcgcccgctcgtcgcacctatattccgaagaaaaatggaaaactgcgccccctcgggctgccatcctggtctgacaaactggttggcgaggtggtacgcttactcctggaagcgtactatgagccgggtttttctgatctttcgcatggttttcgtaaacgccgtggttgccataccgccctgcggaaggttcacgatacgtggaccggcaccgtgtggtttattgaaggcgatatcagtgattgcttcggcagcctgtcccatgaaattctgctggggatcttggctgaaaaaatccacgaccaacgttttctgcgtttgatccgcaacatgctgaaagcaggctatcttgaagattgggaataccgcgaaacgctgagtggctgcccgcagggtggtgttgtgagccctattttgtctaatatctatcttcataaactggatgagttcgttgagcaggagctcatcccgcagtatacacgtggtacgggccgcaaagtaaacccagtctataaacgtctgcatcgtcatatgacctcggcacgcctgcgcggggaccgggcagctgtccgggatctgaaaaaacagctccgcgcaatcccgtatggggatcctatggatccgggttaccgccgcttaaagtatattcggtacgccgatgatcacattttaggtttcattggcccaaaagccgaggcggaacaaattaaagcacggctggcgaagttcttacgcgagacgctgggtctggagttgaaccagcaaaaaaccctgatcactcacgcacgctcccaaccggcccgttttctgggttaccacgtgcgtgtgcagcattgtaacaccaaaattaccggcggccagcgtagcgccaacgggaatatcgcactgcgcgtgccgccggacgtgatccgttctcagtgcgcccgctaccggaaacatggtaaaccttggtatcgctcccgtctgcagaaccttgacgattatgacatcgtccgtacatacggcgccgagtaccgtggcgttattaattactatttgttagcccaggatgtgtcacgcctgcatgaccttcagtggaatgcggaaacatcgatgctgaaaaccctggcattaaagcaccgttcaactgtaagcaagatggcggcgcgttataaagcgaaaatcgaaactagcgatggcctgcgtacgtgttttgaagcgcgtaaacatcgcgaaggccgcaaagaccttgtcgcacgttttgggggtattattttgcgccagaatcgtcgtgcggtcattacggatcctgctagcggtccgccgctctacccccgtaaagagctcacccggcgtttacgtaagcgcgaatgtgaattgtgcgaaactggaacgacggttgcggttcaccaagtcactggtctgaaagatctgggaaaaccgggcgctggacagccggcttgggccaccctgatggccaagatgcgccgtaaaaccctcattgtatgcgcgccatgtcatgactggattcatgccaacccggtggcgcacgcagcg

SEQ ID NO: 276 - DNA, 1782 bp, synthetic construct
  source 1..1782: mol_type = other DNA
atgaaacctactagcgaaatcctggaacgtatgaatcgcaactctggcgaacatccggaaggcgtgtacacccgtctctatcgttatcttttgcgcgaagatatctacatgacagcgtacaataatctgtatgccaacaatggcgcgggtaccaaaggcgtcgatgacgacacggccgatggtttcagcgttgaatacgttcagcagattatcgcagagctgaaagcgttaaactacagccccaaaccggttcgccgtacctaccttaaaaagaaaaatggaaaacttcgccccttaggtattccgtcttttaaagataaactggtgcaagacgcggtgcgccaaatccttgaatccatctatgaaccaattttttccgatttttcgcatggttttcgtccagatcgttcgtgtcacacggcactgaaacaagcgtccaagtattttcgcggcacgaagtggtttattgaaggggacattaaaggatgcttcgacaacattgatcatacagtattacttaacctgttgagtgagaagatcaaagactccaaatttgtaactttaattgggaagttcttaaaagcaggatatatggagtcatgggaatatcataaaacctactcgggtacgccgcagggcggcattttgagcccgatcctggctaacatctatttccacgaattggataagaaagtggaacagctgcgtgccgattttagtcaaccaaatcctaaaagttgttccctggaatatggtcgcattcgtcgggaaatcttgaaaaaacgcaaacagtatggtgaattgactgatgatacgcagaaaaaatcattactgcgcgagatccataaactggaaaccgagatgcgtaaactgccttataaagacgcaactggccgcaaaattgtatatgttcgttatgctgatgactttctgatcggcgtttctggctcacgcaaagattgcgaaaaaatcaagcaggagctgaccgcctttattagcgagaagttaaaattggagctcagcgatgaaaaaacgcgtatcacccacagcagcgaaaacgctcgttttctgggttacgacatcaatgtgcggcgtaacaaccaaacgaaacgtaccgcgaaaggcaccgtgcaacgtaccctgaaccagagcgtggaactgctggtaccgtttgaaaaaattgagcaattcatgtatcagcgtgaaattgtgatccaagccaaggacggatcgctgattccgtggcagcgcgacgccatggcggggctgaccgatctggaagttctggatacatacaactctcagacccgcggtatttgcaactactactctttagcaagtaacttctcaaagctcacatatttcgtgtatctgatggagtacagctgcctgaagaccctcgctaaaaaacataagacacgtatttcagcgatcaaaaaaatgtaccagtgtgggtccagttggggtattccgtatgaaacgaaaagttgcaaaaaacgcatgatgattatcaagttctcggatctgaaaaagggggtcgtctatcagaacgccgatattatcaaacatcacattcacttcaccaatcactcgtctctcgaggaccgcctgcgggcgaatcagtgtgaactctgtggcgcaactgatgttccgcttgaagtccaccatatcaataaggtcaaaaacctgaatggtaaagaacagtgggagaaagccatgattgcgcgtaaacggaaaacgctgattgtctgcaaaaattgccatatcgctattcatcacagc

SEQ ID NO: 277 - DNA, 1788 bp, synthetic construct
  source 1..1788: mol_type = other DNA
atgaaaccaactatggaaatcttagctagtattaaagagaactctagcaaaaattctgaagaggtgtttacacgcttataccgctaccttctgcgccaggatatttggtttgaagcatataagaacctgtatgcaaattcgggagccgcgacgaacggtgtcgataacgataccgccgacggattctccaaagagaaaattgacaaaatcattgcgtcactggcggacgaaacatataaaccgaagccggcccgtcgcacctatatcaaaaaagcaaatggtaaaatgcgtccgttggggatcccaacgtttaccgataaacttgtccaggaagtcttacgtatggtgatggaagccgtgtatgaaccggtgtttctgaactgttcgcacggctttcgcccgaaacgttcgtgtcacaccgccctgtccactctgaaaaaagaattcacaggtgcaaagtggtttgttgaaggcgatattaaaggctgctttgacaatatcgaccatgcagtactcgtcggcttcattaatcagaaaattaaagatgcgcgcctgattaagctgatctaccggttcctgaaagcaggctttgtggaaaactggcaatataacaacacttacagcggcactccgcagggcgggatcatctctcctcttctggccaatatctatcttcatgagctggacaagttcgtgatgactctgaaatcggaatttgataagccaaatgaaaccgttcgtaccaaagagtacaaccgcttattcacccaacgtgttaaactgaagaaactgattgactgtgcggatggtgaagaaaaacaggatctgctgaaacaatataaacaggttcgtgcggaaatgatgaaaacgccgtacacgcctcaggatgataaaaagatcaagtatatccgttacgctgacgattttctgattgcggttaaagggaaccgtgaagactgcatggaaattaagcgcaaactcgcggaattcattagtgggaccttgaaaatggaactgagcgatgaaaaaacgttaattactcactcctcggagaaagctcgctttcttgggtatgatgtttcaatccgtcgtaacagcagcattaaacctcatggcaaaggtcgccccacgcagcggactctgaacaataaggtagaactgctgattccgaaggacaaaattagtaagttcctgtttagcaagggcatcgtgcgtcaaaaaaagtgtgacgaaatgtttccgatttcccgggtgcccttgcgcaacagcaccgatctggagattatcacgatctttaatgcagagttgcgcggaatctgcaactactactcattggcgtcaaacttcagcgatctcaattattttaactaccttatggagtatagttgcttgaaaaccctggcgaccaaacacaaaacccggatcacaaaaattaaagagaaattcaaagatggtaaaggttcctgggcaatcccatatgaaacaaaaagtggcaaaaaattgatgtattttgccaagtacaccaattgcaagggtgcgaatgccaccgataccgtcacgaaagctgctgtaacgattggctataatcgtaacaccttcgataaacgtctcaatgccgatatctgcgagttatgtggtaaaacgggagcgggcaactacgaaattcaccacattcataaagtaaaagacctcaaaggtaaagaattatgggagcgcgctatgatctctaaaaagcgtaaaaccctggtggtttgccatcaatgtcatcagaatattcatcatccgaaa

SEQ ID NO: 278 - DNA, 1749 bp, synthetic construct
  source 1..1749: mol_type = other DNA
atggctagcgcatggagtcatcctcaattcgaaaaatccggaatggattatacggaatcggattttgacgccgcatccccggatgaagtatcagagtggcatagtattgattggaaagctgtgcagtactttgtgggaaaagaacagagcaaaatcgctcaagccgagcaagccaaggacttccgtcgtgtgaaacgtttgcagcgcaatcttacacgttcttggcaggcaaaagctcttgctgtgcgcaaagtgacagaaaatcaggggaaacgcacttctggtgttgatcgtgaactgtgggatacgccccaaaaaaaatggattgcggtaagccgtctcaacctgcatggttaccgcgcactgccactgaaacgcgtctggatccctaaagccgacggcaaagaacggccgctcggcatcccgaccatgcgtgatcgtgcaatgcaggccttatgcttattggccatggaaccggcagcagagtgtcatgccgacccaaactcatatggctttcgcaaaggtcgcagtacccatgacgcacgccaacagctcttcgtgtgcctgagcaaaaaagtgtcggcgcaatgggtgcttgatgccgatattactggctttttcgataatattaatcacgactggttacttgctaacgtacgtatgaaccgtcgtgtcctgggacagtggctgcgctgtggcgtagttgataaacagcagctgcaaaaaaccgaggcgggtaccccgcaagggggcattattagcccgttgctggcgaatctgactctggatggtttagaggccggactgatgcgtttcctcaaggatcagctgggctttgaaaaagcaaaaaaggcgaaagtccaccttgtgcgttacgctgacgattttgtagttacgggtgacagtaaagaagttcttgagacggttgttcgtccctgggttgaagcctttttacgtgaacggggtctgcaactgcacaccggcaaaacccggatcgttcacatcaacgaaggtttcgactttttgggctggaacttccgcaagtattctgaaaccttgctgattaaaccgagccataagaacgtcaaagcgttttattccaaagtccgcgaggtgattgcaggccatctgtcccagccgaaggaagtactgattgctaaactgaacccgattttgcgcggctgggcgcgttatcaccagggagttgtcgcgaaagcgacctttacgaaacttgatcatcagatcctgtggcgtctgcggcgctggggtatgcgtcggcacccacgctggacacggggtaaagtgttcaaacattactggacccacactagcgggcgttgggaattcgaagccaaaacgcgtaatcgttgggacgaggaaatgcagttacgcttatacactctggcggatacaaaaatcgtgcgtcacaaaaaggtaatcggcgaatatcatccatacgaccctgcgtgggaagcgtatggggaaggactgaagcgtaatcgtatggtgcagtccgtctggtcgggtcagcgcttggagctctggatgacccaaaatggcaagtgcgcgcactgtggcaccgatatggaccatgaggattcagggttagataaccatcatattgttccggtgcgctggggtggcacggattcgctgagtaaccgcgttctgctgcatccctggtgccaccgtcgcatccatgcgctcggtctggaagtcgcgaagcctgtgccggtccgcgggctgtga

SEQ ID NO: 279 - DNA, 1524 bp, synthetic construct
  source 1..1524: mol_type = other DNA
atggctagcgcatggagtcatcctcaattcgaaaaatccggaatgaacgtcgaacagtcgatgtgtgctgcttctggcccggcgatgcagtgggaacaaatcgactggtcgcgctgcgaacagaaggtccgtcgcctgcaggcccgtatcgtcaaagccactcaggaaggtcgtcgtggcaaagtaaaggcgctgcaatggttactgacccatagtttcagcggccgtgccctggccgtaaaacgcgtgacgcataacaaaggtaaaaatacgtcaggtgttgacaaagctatttggcggaccccggcatctcgttataaagcgatcgatacgcttcgtcgtcgtgggtaccaaccgcaaccgttgcgccgtgtgtatatcccaaaagcgaatggtaaacagcgccccttgggcattccgaccatgaaagatcgtgctatgcaggcgttatatcttttagcgctcctgccgattgcggagacaaccggcgatcttaactcctacggttttcgcccggaacgttccaccgcagatgcgattgaacagtgctataaagtggttggaatgcgccattccgcccagtgggtgctcgaaggcgatatccgtgggtgctttgataatatctcacacgaatggatgctggatcatattcctacggacaaagaagtcctgcgtaagtggttaaaaactggctatatggaaaatcgtaaactttttgcaacagaggccggtaccccacagggtggtattattagcccaacgttagcgaacctgaccctcgatgggttagaacgcctgctgaaacagactttccgtaaccgtcaggtaggagaaaagcataatcctaaggtcaacttcgtgcggtacgcggacgattttatcatcacgggaagctcgaaggaattgctggagaacgaagtgaaaccccttgtggaatcattcttgctggaacgcggactgcaactgtctcctgagaaaacctgtattacccacattgaggacggttttgactttctcggccaaaatctccggcgctatggccgtaaggtattgaccaaaccgagtaagaaaaacatgcatgcctttctggagaaagttcgcggtgcaattaaacggaactccacggctcagcaggccaatctgattggcattctgaacccgatcatccgcggctgggccaactaccatcggcacattgctgcaagcagcgcctttggcaaagcagagatggcgatctggcgcagcctgtggtcgtgggcgaaacaccgccactggaagaaaccgactgcctggattgcaaatcgctattggcaccgtctggggaacgggcgccgtatgttcgcagttatggcaggttctaacgcgcccaaaagtcgtgcgatggttgcttggctggtgaatccggcaaaaacaccgatccgccgccatatcaaagttcgtagtaacgcgaatcctttcgatccaaattggcgttcatactacgatgcccgtaaaagtctgaaacgcgcgagcagccaacagtga

SEQ ID NO: 280 - DNA, 1614 bp, synthetic construct
  source 1..1614: mol_type = other DNA
atggctagcgcatggagtcatcctcaattcgaaaaatccggaatgctgaaagaagaacgtcagatgacccagttaggaaattttaagattccaaaaagtggggcttcctcgactaataagctgaactggcaatctattaactgggtgaaagtaaaacgcgacgtgcgccgcctgcagatgcgcattgctaaagccattcgtgaaaaacgttataacaaagcaaaaagtcttcagtgggtgttgacgcattcgctgagcgccaaactcttagctgtaaaacgcgtaacttcgagcagcggctcacgtacagcgggcgtggatggtaaaatttgcgcaagcaacaaggacaaaatgcaactggcgttgtcgctgcgtcgttacggatacaatgcgcagccgctgcgtcgcgactatatcccgaaacgtaacggtaaacagcgccctcttggcattccaaccattaaagaccgtgcgatgcaggccctgtatctgctgggtttggaacctattgctgagacactcgctgatccgaatagctatgattttcgccagcaacggtgcaccgcggatgccattgagcagtgcttcaaagtgctgtctcacaaaacgagtgcccagtggatcctggaagtcgatattgaaaaatgtttcgatcggatcaatcacaattggctgaaagaaaacatcttaatggacgtgtcactgctgaaccaatggctggaaagccgctacatcgagcgtaaacaattacacccaacgctcgccggcaccccgcagggcggtattatttctccgaccctggctaatatgaccctggatggtttagagaaagcaattaagagtgtcgcgaaaccggcatctaaagttcacgtcatccgttatgcggatgattgggttgttaccggcaactcccaggaaattttggaaaacaaagtcatgccggccatcgagaaattcctgaaagttcgcggtcttacgtgctcccgtgagaaaaccaagatcgtccatatcaaggatggctttaactttctgggcttcaatatccgcaagtaccacgacaagctcttaattaaacccgccactaaacacgttcatgcgtttctgaagatggtgcgcaatattaccaaagcatccgtgagcctgccgacggacattctcctgcgcgttttgaacccaaaaatccgtggttggggaaactactatcggcatgttgtgagcaaggatgttttctgttatgtggataactgtatctatcttgcgattgcgcgttgggcacgccgtcggcatccgcaaaaacctgcacattggttacgcaaaaaatattttcgtcagcagggcatgcggaattggatcttctctacgaaagtatacgataaaaaggggaaaatcgtgaatcgtgaccttgtccagctcaagtatcttccgattaagcgtcatcgtaaaattattgccgaagcgacaccgtttaatcccgagtatatcgaatactttttgaaacgcaaaagttaccaggggctgaactggttgtaccgctcactgcaaaaacaggcaaaaagcttttcacgttcggcgaaactgcagaaccaaaattcccgtatcgaacaagaatcatga

SEQ ID NO: 281 - DNA, 1428 bp, synthetic construct
  source 1..1428: mol_type = other DNA
atggctagcgcatggagtcatcctcaattcgaaaaatccggaatgaaactgacctataaacaggctattcgcccgttcgcacgcggcccgccgctgcgtctggtccagtcccattttgcagaactgttcatccgccggcagcaaaatcttttgatgaatttttgctactccgacgaacgccgctggcgcaatattaataaaagtaccgtaccggcggaaattcagcgctggaaagacattgatttccgtaaagcggaaatcaaggtgaaaaaattgcaacgtcgtatcgcttccgcgtgggcgaacaaaaactttaaaactgtcgatacccttcagcataaacttattcactcgttctctgcgaaagcgcttgccgtaaaaacggttgttgataataaaggcagtcgcacccctggcgtcgatggtgtgatctggagcgaccttcgccagaaactggatgccatctatcagttgcgccgtcgtggttataaacccatgccattacgccgtgtttatgtcccgaaaaaggacgggacgctgcgtccacttagcattccgacgatgcgggaccgcgcgatgcagatgctgtgcaagatggcgttagagccaatcgccgaagcaacagccgacaaacgttcgtttgcgtatctgtcgggtcgtggcgcacgtgaggccattatttgtctgaaagttactatgcgtgacaacccccagtttcgctgggttatgaaggctgatgtggcaggctgctttgataatattgatcattcttggctcctggagcacattccgattgatcgtaagattctgtaccggtttctgaagtgcggctatattgaggatagtacattctacccgaccgaacgtggtgtgccacaagggggatgcattagcagcgtgttatgtaacatgacgctggatggattggaaggtttgctgaaacagcagtttgggctgagtgtatgtatgattcgttacgcggatgatatcatcatcatcggtgaaagccgcgagattctggtacaagccgtgactccggtgattgaatcattcctcgcggaacgcgggttagcgctcagcaaaaagaagaccggttattatcctgttaaagcaggcgtgtcttttctcggatggaaaacctaccgtgaccgggatcgcgtcattagcgaaccgtcaaatatcgccgtgaaccgtttaatgaacgagatcgaatctatcgcagccttggcaattgattatcacgctcaatgtgaaaaagtcagcagtaaaattcgtggctggctgaactattaccggggcatcgctcctcgcctgtccctgaacgaagtggagttctacatcgcccagtcgttactgcatatgcaggatgttgaactgctcgctggtgaaattcaatcaatcttttcagagctgctggacacgctgtga

SEQ ID NO: 282 - DNA, 1446 bp, synthetic construct
  source 1..1446: mol_type = other DNA
atggctagcgcatggagtcatcctcaattcgaaaaatccggaatgatccgccatcgtgataactcgagtgaatcgtggaaaacgctgccgtggaaacagctgagccgcaacctttttcgcctgcaacgccgtgtttataaagcggtacaggtgggagataaacgcaaagccaaaagtctgcagaaactgattctcaaatccaccgccgctcggctgctcgctattcgccaggtcacgcaattaaacgccggccagaaaaccgcggggatcgacggtcagacagcgctgacattcgaacagcgttttgaattgagcgagaaactgcgtaccgaggcaaataactggaaacatcaaggattgcgtgaaatccctattcctaagaaagatgggaaaactcgtatcctgaaagtgcccaccatcgcggatcgtgcgtaccagtgcctggtcaagtatgcgttggaaccagcgcatgaagcaaccttccatgctcgttcatatgggttccgtacgggtcgttccgcgcacgatgcacagcgccaactgttcaactcgctgaacagtcaagccaacggcatcgaccagcgggttattgaactggatatcgagaaatgctttgatcgtatcaatcacacagccattatggaccggttaattgctccactgagcattaaacagggcatttttcgttgtctgaaggccggcgttaatcctgaatttccggaactgggaactccgcagggcggtgtcgtgtctccactgcttgccaatattgcgttaaacggcattgaatcgattcatcgttatcatcgtgactcaaacaaacgcattaccgataaaaccagcgcagaaagcattatcgaaccgtctgtgcgttatgctgatgatatggtcattatcttgcgcccgcaggacgatgcaaccgtgattttggacaaaatctctcacttcttagccgagcgtggtatgaaagtatcagaaaaaaagaccctcgttaccgcagcgaccgatggttttgactttctgggctggaactttaaggtacaaaataatggtaagtttaagtgtgtcccgagtgtcgacaattacaaggcctttcggaaaaaagtgaaagcgatcgttaataacagcaactacggggcaacgacgaaagcagagaaactcgctccggttgtacgcggctggcgcaactatcaccgcttctgtaaaatggatggcagccgcttttcactgtggcacattgaacatcgcgcgtttaaagttttcaattctgaaactaagcagaattgccacacgtgcaaacaactgcttaaaaaagccttcccccaagtgccatacagtgagaacaagtatattaatgtgacgggtgaaaaatccccgtacgacggtgatcttacttacggcagcgagcgcaattccccgttagtgatccgccagaaatatctttga

SEQ ID NO: 283 - DNA, 1866 bp, synthetic construct
  source 1..1866: mol_type = other DNA
atggctagcgcatggagtcatcctcaattcgaaaaatccggaatgagcacggcgtcttcccctctggtgtacgaatggaatgatatcccatggcgtagcatcgaacggaaagtattcaaacttcagaaacgcatctatcaggcagcacagcatggcaataaagtggcaatccgtaaactgcagaagctgctgctgtcgtcctggtatgcgaagtgtttggccgtgcgtaaagtcacgcaagaaaataaaggtaaaaaaacagctggggttgacggaaaacttgcactgtccccgaaacagcggatccgtttagtacaaacgctgtccctgaaaccaaagagtacccccgttcggcgtgtatggattccgaaacgtggcagcgatgaaaaacgtccgctgggcatcccgactatcgagaatcgggctcagcaagcactggccaaaatggccttggaaccggaatgggaagcacgctttgaacctaattcttatggctttcgtccgggtcgctcggcgcatgatgccattgaggccattcagcagtctattaagtacacgcagaaattcgtgttagacgccgacattgccaagtgttttgaccgcatcaaccatcaggcgttactggaaaagctggaaacgttcagtgtgatgcgccgcgccgttaaaacgtggttaaaagccaaaattatggatggggatgaactctttccgtcagaggaaggtactccgcaagggggtgtgatttctccattattggctaacattgcgctgcatgggctggagacagcaattaccactgcttttcctaaaacagtaaaaatcgatggcattattcacggccgctatcaaccacgtgtggttcgctatgcagatgactttgttgtcctgcacgctgatttgaaattagtggaaaaagcgaccagtattgcccaggagtggcttagcggcatgggcctcgagctgaaaccaagcaagacccgcattacccacactttcaaaaaacacgaaggaaacgtgggttttgattttctggggtttcatgttcgccagttcaaagttggtaagtgcaattatcgtacctcgggccatagccgtattctcgttgacttcaaagcgatcattaaaccgtccaaggaagcgatcgcgcgtcattaccgccaagtggccgaggtcattgaacgtaacaaaagtgctgagcaggcgaacctgattcggttgctcaacccgaaaatcgttggctggacaaactactattcaaccattgtgtcaaaggcggtcttcagcaagctggatcatcttgtcacgaaaaaacttctccgttgggcaaaacgccgtcatcaacatcagtcacgtcgccagaccgtccgcaagtactggaaattttcagaaaaagggcgtggttggatctttcaggcttcggacattagcattctgcgttggtatgcggacgtgcccattaaacgccacgtgcaggtcgcgggcaccaaaagtccgtttgatggaaactgggtatactggtctaaacgtctccagcactatccgctgttgactttccgccaggcgaaacttttaaaagagcaagagggtaagtgccgttggtgtcgtctgtactttaaacaaggagatcgtatcgaagtcgatcaccgcatcccgcgccgctatggcggtcgtgatgaatacggcaatctgcaaatgctgcacgttcattgccacgatgaaaaaaccgcgatcgatggcaccatcgacagtgttggtcctgattcgattgacgtaaacgattatgtgattgaagaaccgtgcgaagtggagagcttgacccatggtagcgaagatgaagccttcggtcgtcccgacgtcctggtatga

SEQ ID NO: 284 - DNA, 1704 bp, synthetic construct
  source 1..1704: mol_type = other DNA
atggctagcgcatggagtcatcctcaattcgaaaaatccggaatgcagaccatgcgcaacgcgaatgtgaccaaacgcacgacagattggcgctctatcaattggcgtaaagcgtatcggatcgttcgtaatcttcgccaacgtatctttaaagctacgcaaaaaggaaacctgcgtaaggtgcggtcgctgcagaaattgatgatgaagtgttactcaaatattttactcgcagtccgccgcgtcacgcagattaaccgtggcaaaaacactccgggcgttgataaactgattattaaaacaccagaggctcggggtattttggtagataccttatccttattcattccgtggaaaccattaccgacaaaacgtgtgtatattccgaaaagtaacggcaaaaaacgtcctcttggcattagcactattattgatcgctgtatccaagccattgtaaaaaacgcgctggaaccctactgggagagcaagtttgaaattagcagttacgggtttcgtcccggacgttcagcccacgatgcgatcgaaaaaatctatcttaccgcctgtccgcatcgccgtaaaaaatgggtactggacgcggacatcaaaggctgctttgacaacatctctcatgaattcttaatgaaaacgattggaaattttccagcccgtaaactggtgtaccagtggctgaaagctggttatgttgaacaaggtgaatattttcatactagctcgggcaccccgcaggggaatattatttcaccgttgctggccaacattgcgttgcatggcatggaagaagctctgggtattaagtataataaccgcagcgaaattgttggcaatcgtgcattggtgcgttatgcagatgattttgtgattttttgcgaaactaaagaagatgccgaacaagcccagaccgcgctcgagaaatggctgaacttgcgtggcctggagctgagcaaggaaaaaacccgcatcgtccatctgaaagaaggtttcgacttcctgggtttcaatatccgccagtaccaggtcaccaatacgaaaaccgagtggaaactgttaatcaaaccttccaaagagtctatcctcaacatccgtaaaaaactccggcaagaatggcttaacctgaaaggtcataacgtgaactcagttattgagaagctcaacccaatcattcgcggcgaggctaactattttcgcattggcgtggcgtcggaagcattttccgcactggatgattggatgtttaaacgcgaatgcaagtatgtaaaccgtactcacccgaaaaaaaataagcagtggcgtgcgaataagtattgggggaaacttaatctggaacgcaatgataagtgggttttcggggacaagaacaccgggaaacatatcctgaagttctcttggttcaaaatcaagcgtcacaaacttgttgtcggtaaaagttcccccgatgatccggcgctgcgcaagtactgggaagaacgtgaaaaagacaaaacgtcgaatcatcctaagagtatccagaaaattgcaagcaaacagggtcatacctgtccgatttgcggtcagtccctgtacaatggcgaggagatccacaaacaccacaaaacgccgaaaagcaaaggcggaaccgacaactacagtaacctggaactggtgcatctgtattgccaccagcaaattcactcgggtacatga

SEQ ID NO: 285 - DNA, 1716 bp, synthetic construct
  source 1..1716: mol_type = other DNA
atggctagcgcatggagtcatcctcaattcgaaaaatccggaatgaccaaactgaatcagaaatggcacaacattaactggaacaaaacctcgaagtacatcaagaatcttcaggaagaactggtggtagcgtacaagaacaacgatcaaaaactcttattctcattacaggaaaaactgatgatgtcatttgaaggtcgtgctttagctgtacgccagattgttaccaacgatggcaaaaaaacgccagggttcgataagattatctggaattctcctagtgcgaaactgcaggcgattttacaactgcgtgaaatcctcattcagaagtctggtgattaccaaaccggcccggtccgtcgtacttggattccaaaagatcagagcgacgaactgcgtccgctcggtatcccgaatatgattgatcgtggtctgcaggcattggtgctgatgtgcctggatccgattatcgaagaaatgagcgacacctatagttttggctttcgcaaatatcgcaatactggcaatgcgatccagcgcattcgtacaattctggataaaccgaaaggtccgaagtgggtttgggatgccgatattgaaaaatgctttgacaaaatttcccacgaattcttggaaaaagagacgaaacttattgcatgcccaaaggcttacgaatatattatcaagtggttaaaagcgccgatcatcaataaaggcattaagaccttccccagcgatgggacgccgcagggcggcatcctctctcctctgctgtgtaacattgccttaaacggattggagaacgccgtgcgtgatggcctgccctctccgaatagtagtgaaggccgtaaaatttccggttcgtgggttattcgttatgccgacgacttcatcgtaaccagcccgtgtaaagaacggctggtcaaagaacacattcctcgcgtatcgttttttctttcgaaacgtggtttgaacatctcggaaaaaaagtccaaaatccgttctttggaaaacgaaggcttcacatttctgggatgggatgttacactgaaaagccgcagcctcaagcgcaataagagtaaaaccaacaaaaaagtgctgattatccgtcccagcaaaaaaagcatcaaaagtttcaaacgcgagattaaagataagtttcgcagcaataaaccgattcgggcactgatctcagagcttaacccggtgctgcgcggctggacgaactactatcgcgattcgtatcactctcaggaagtttttcaatcaattggacattatattcaccaattgtggtggaaatgggcgcagaaaaaacatccgaagcgcaataaaaattggatctacaatcgttatatcttcaatacggagaagaactcctggcgtatcggggagtccaaagacattatgctgtttgacgtgattcaggcgaaacagcttcggattaaaagcttacgtaataacgtcaacccatatctggatgaggactactacattcagcgcactgtcattcgtgacagcgaaaaatttcgcgttgcaatctacaaaaaacaagattttcggtgctatgtgtgtgagcaatccctgtatgggagtgaggaagtgcatcttcatcatctgattcctcgtaaagatggtggtcaatatactctggaaaacatcgtcccagtgcatgccacctgtcatgagtcaatcacgtatacccgcaaagactga

SEQ ID NO: 286 - DNA, 1542 bp, synthetic construct
  source 1..1542: mol_type = other DNA
atggctagcgcatggagtcatcctcaattcgaaaaatccggaatgtcagtgtccgaacccgaaatcacatcggtcactgaccttaccgataaagaactcacgttacaatggaaaaccatcgactggagtaaagccgaaggtattgtcaataaccttcagagccgtattgcatcagcggcaaaagaaggaaattggaaaaaggtttcgaaactgtctcgtctgctgactcacagttattatgcgcgggctcttgcggtacggaaagtaagcaccaacaaaggtagtcgtacacctggcatcgatggcgtgttatggacctcttctggtgataaaatgcgcgcggttttacaactgaaaagcaaagggtaccacgccaaaccgctgaaacgtaagtacattctgaaaaagaatggtaaactgcgtcccttgtccattccgacgatctacgatcgcgctatgcagactctgcatgctctcgctttaggtccagtggaatcagcgacaagcgataaaacgtcctttggctttaagccttatcgtagcaccaaagatgcatttgcatatcttaatatctgtctgtctaaaaaaaacgcgccgcagtggattgtcgaaggggatatcaaagcctgctatgacgaaatctcccacgagtggatcctggccaacacattgatgaacaagaaagtcctgaaagaatttctgaaatccggatacatcgaaaattatcacctgtttccaaccgagaatggcacgccgcaagggggcactatctcgccgatcatcgcaaacatcgttttgaacggcctggatacgattctcgcggaagtgttctattcttggaacaacggaacgattgacaagaaacatcggaacaaacatcgcgtgaactttgttcgctttgcggatgatttcgtaattaccgctgatagtccggaaaccgcccacaaaattctggacattgtgaaaacgttccttgagccacgcggtctgaccttaagcaaagagaaaaccttggtgacccacatcagcgatggctttaccttcctcggttggaatttccgcaaatacaagggtaaactgctgactaagccgtcgaaagaaagtcagaaagatattatcacgaaaattcatgacgtcatgtataaagcccgtgcccgttctcagagcgagctgattcgcctgttgaaccctattattcgcggctgggcgcaataccataatcatgcgatttcaagcgcaatcttcaaaaagttagatcacattatgttcatcatgctcgttagctgggcgcgtcgtcgccacccgaataaagggtttgcatggattatggccaagtattggcatcgtatcggcaagtggaaacatgccttctcgacagactcacagaccctggagcgcttttcgaatatgaaaattatccgtcatcgtttggctaaactggacaaaaatccgtatattgaccgcgattactttgaacgttggcgggtgatcgagcattatcgcaagaaacagattagctacagtaagagttccctgaactga

SEQ ID NO: 287 - DNA, 1740 bp, synthetic construct
  source 1..1740: mol_type = other DNA
atggctagcgcatggagtcatcctcaattcgaaaaatccggaatgaatgatatcaaaacgagctgcgccagtacagatcgtaaaattgttgcgtgggattcaattgattgggacaagtgcgaatatgaagtgcagaaactgcaagcacgtatcgtcaaagcccaaaaagatggtcgctactgcaaagtaaaggccttacaatggacgctgacccattcattttcagcgaaagctcttgcagtgaaacgcgtgacctctaacaaaggtaaagaaacaagcggtgtagatcgtgttctgtgggattcgccgctgggaaagtggaaagcgattagtaccctgaaacgtcgcggctactgcccattaccgctgaaacgtgtgtatattaaaaaaagcaacggtaaacttcgtccgctgggcatcccgaccatgaaagaccgggcgatgcaagcgttatatctgatggccttggatcccgtggcagagacaacggctgataatcatagctatggctttcgtaaagaacgcagcacagcggatgccattgtacagtgtttcattgtgctgtcacgtacggtcgcaccggaatggatcttggaagcggatatcaaagggtgctttgaccatatttcccatgagtggctgctcaacaatattccgatggaccgggttatgctcaagaaatggttgaagtgcggctttatctttaacaaaatcttaaacccaacggaagaaggaaccccgcaaggcggaattatctcgcctactctggctaatatgaccctggacggtattcagaagcttctgcaggaacgcttcaaaaaacgcaaagttaaaggcgtcgaaatctacccaaaaattcaccttgtccgttatgcggatgatttcattattactgggcgtactaaagaagttctggaaaatgagatcaagcctttaatttgcgagtttctggccgagcgggggttgaccctgtccgaagaaaaaactaaaattacacacattcgcgagggcttcgacttcctgggtttcaacatccgcaagtttaataataccctgctcaccacccccagtgagaaatcgatcgaaaaattcttggagaagattcgcaccattatcgaaacgaagaaatccactaagcaggagagcctcatccgtgtacttaacccgatcattaaaggttggtccaattattatcgcaccggcactgctgcaaaaagttttcagcgcgtcgattgggaaattttccgcaaactttggcagtgggcgcgccgtcgccatagccagaaatgtaaaggctgggtgaaagaaaaatactatcgccgtatcggtaaccaggcgtggtgtttttctgctgaaaaagagatccagaaaaagggcgaactgaaatatgtgcagttggtccacctggcagccgttaaaaccaagaaacacgtgaaaatccgccatgacgcaaacccgtatgacacgaattataagtgttactttgaagaacgtgccacgcgtaaaaaactggaagccttaaaagggaaaagttcctcttggaagtatgcgtgggagctgcagaaacggaagtgtcctatctgcggcgagacgctgaacctgaacaatgactggaaaatttcgaagcaatttgtggatggtaaactcaaagaacgtatctaccatgaagactgttactataacgatgttcacccaaccaaaaaaaagtactacgaaagcgtgtctttacagaaactgtga

SEQ ID NO: 288 - DNA, 1704 bp, synthetic construct
  source 1..1704: mol_type = other DNA
atggattatacggaatcggattttgacgccgcatccccggatgaagtatcagagtggcatagtattgattggaaagctgtgcagtactttgtgggaaaagaacagagcaaaatcgctcaagccgagcaagccaaggacttccgtcgtgtgaaacgtttgcagcgcaatcttacacgttcttggcaggcaaaagctcttgctgtgcgcaaagtgacagaaaatcaggggaaacgcacttctggtgttgatcgtgaactgtgggatacgccccaaaaaaaatggattgcggtaagccgtctcaacctgcatggttaccgcgcactgccactgaaacgcgtctggatccctaaagccgacggcaaagaacggccgctcggcatcccgaccatgcgtgatcgtgcaatgcaggccttatgcttattggccatggaaccggcagcagagtgtcatgccgacccaaactcatatggctttcgcaaaggtcgcagtacccatgacgcacgccaacagctcttcgtgtgcctgagcaaaaaagtgtcggcgcaatgggtgcttgatgccgatattactggctttttcgataatattaatcacgactggttacttgctaacgtacgtatgaaccgtcgtgtcctgggacagtggctgcgctgtggcgtagttgataaacagcagctgcaaaaaaccgaggcgggtaccccgcaagggggcattattagcccgttgctggcgaatctgactctggatggtttagaggccggactgatgcgtttcctcaaggatcagctgggctttgaaaaagcaaaaaaggcgaaagtccaccttgtgcgttacgctgacgattttgtagttacgggtgacagtaaagaagttcttgagacggttgttcgtccctgggttgaagcctttttacgtgaacggggtctgcaactgcacaccggcaaaacccggatcgttcacatcaacgaaggtttcgactttttgggctggaacttccgcaagtattctgaaaccttgctgattaaaccgagccataagaacgtcaaagcgttttattccaaagtccgcgaggtgattgcaggccatctgtcccagccgaaggaagtactgattgctaaactgaacccgattttgcgcggctgggcgcgttatcaccagggagttgtcgcgaaagcgacctttacgaaacttgatcatcagatcctgtggcgtctgcggcgctggggtatgcgtcggcacccacgctggacacggggtaaagtgttcaaacattactggacccacactagcgggcgttgggaattcgaagccaaaacgcgtaatcgttgggacgaggaaatgcagttacgcttatacactctggcggatacaaaaatcgtgcgtcacaaaaaggtaatcggcgaatatcatccatacgaccctgcgtgggaagcgtatggggaaggactgaagcgtaatcgtatggtgcagtccgtctggtcgggtcagcgcttggagctctggatgacccaaaatggcaagtgcgcgcactgtggcaccgatatggaccatgaggattcagggttagataaccatcatattgttccggtgcgctggggtggcacggattcgctgagtaaccgcgttctgctgcatccctggtgccaccgtcgcatccatgcgctcggtctggaagtcgcgaagcctgtgccggtccgcgggctg

SEQ ID NO: 289 - DNA, 1479 bp, synthetic construct
  source 1..1479: mol_type = other DNA
atgaacgtcgaacagtcgatgtgtgctgcttctggcccggcgatgcagtgggaacaaatcgactggtcgcgctgcgaacagaaggtccgtcgcctgcaggcccgtatcgtcaaagccactcaggaaggtcgtcgtggcaaagtaaaggcgctgcaatggttactgacccatagtttcagcggccgtgccctggccgtaaaacgcgtgacgcataacaaaggtaaaaatacgtcaggtgttgacaaagctatttggcggaccccggcatctcgttataaagcgatcgatacgcttcgtcgtcgtgggtaccaaccgcaaccgttgcgccgtgtgtatatcccaaaagcgaatggtaaacagcgccccttgggcattccgaccatgaaagatcgtgctatgcaggcgttatatcttttagcgctcctgccgattgcggagacaaccggcgatcttaactcctacggttttcgcccggaacgttccaccgcagatgcgattgaacagtgctataaagtggttggaatgcgccattccgcccagtgggtgctcgaaggcgatatccgtgggtgctttgataatatctcacacgaatggatgctggatcatattcctacggacaaagaagtcctgcgtaagtggttaaaaactggctatatggaaaatcgtaaactttttgcaacagaggccggtaccccacagggtggtattattagcccaacgttagcgaacctgaccctcgatgggttagaacgcctgctgaaacagactttccgtaaccgtcaggtaggagaaaagcataatcctaaggtcaacttcgtgcggtacgcggacgattttatcatcacgggaagctcgaaggaattgctggagaacgaagtgaaaccccttgtggaatcattcttgctggaacgcggactgcaactgtctcctgagaaaacctgtattacccacattgaggacggttttgactttctcggccaaaatctccggcgctatggccgtaaggtattgaccaaaccgagtaagaaaaacatgcatgcctttctggagaaagttcgcggtgcaattaaacggaactccacggctcagcaggccaatctgattggcattctgaacccgatcatccgcggctgggccaactaccatcggcacattgctgcaagcagcgcctttggcaaagcagagatggcgatctggcgcagcctgtggtcgtgggcgaaacaccgccactggaagaaaccgactgcctggattgcaaatcgctattggcaccgtctggggaacgggcgccgtatgttcgcagttatggcaggttctaacgcgcccaaaagtcgtgcgatggttgcttggctggtgaatccggcaaaaacaccgatccgccgccatatcaaagttcgtagtaacgcgaatcctttcgatccaaattggcgttcatactacgatgcccgtaaaagtctgaaacgcgcgagcagccaacag

SEQ ID NO: 290 - DNA, 1569 bp, synthetic construct
  source 1..1569: mol_type = other DNA
atgctgaaagaagaacgtcagatgacccagttaggaaattttaagattccaaaaagtggggcttcctcgactaataagctgaactggcaatctattaactgggtgaaagtaaaacgcgacgtgcgccgcctgcagatgcgcattgctaaagccattcgtgaaaaacgttataacaaagcaaaaagtcttcagtgggtgttgacgcattcgctgagcgccaaactcttagctgtaaaacgcgtaacttcgagcagcggctcacgtacagcgggcgtggatggtaaaatttgcgcaagcaacaaggacaaaatgcaactggcgttgtcgctgcgtcgttacggatacaatgcgcagccgctgcgtcgcgactatatcccgaaacgtaacggtaaacagcgccctcttggcattccaaccattaaagaccgtgcgatgcaggccctgtatctgctgggtttggaacctattgctgagacactcgctgatccgaatagctatgattttcgccagcaacggtgcaccgcggatgccattgagcagtgcttcaaagtgctgtctcacaaaacgagtgcccagtggatcctggaagtcgatattgaaaaatgtttcgatcggatcaatcacaattggctgaaagaaaacatcttaatggacgtgtcactgctgaaccaatggctggaaagccgctacatcgagcgtaaacaattacacccaacgctcgccggcaccccgcagggcggtattatttctccgaccctggctaatatgaccctggatggtttagagaaagcaattaagagtgtcgcgaaaccggcatctaaagttcacgtcatccgttatgcggatgattgggttgttaccggcaactcccaggaaattttggaaaacaaagtcatgccggccatcgagaaattcctgaaagttcgcggtcttacgtgctcccgtgagaaaaccaagatcgtccatatcaaggatggctttaactttctgggcttcaatatccgcaagtaccacgacaagctcttaattaaacccgccactaaacacgttcatgcgtttctgaagatggtgcgcaatattaccaaagcatccgtgagcctgccgacggacattctcctgcgcgttttgaacccaaaaatccgtggttggggaaactactatcggcatgttgtgagcaaggatgttttctgttatgtggataactgtatctatcttgcgattgcgcgttgggcacgccgtcggcatccgcaaaaacctgcacattggttacgcaaaaaatattttcgtcagcagggcatgcggaattggatcttctctacgaaagtatacgataaaaaggggaaaatcgtgaatcgtgaccttgtccagctcaagtatcttccgattaagcgtcatcgtaaaattattgccgaagcgacaccgtttaatcccgagtatatcgaatactttttgaaacgcaaaagttaccaggggctgaactggttgtaccgctcactgcaaaaacaggcaaaaagcttttcacgttcggcgaaactgcagaaccaaaattcccgtatcgaacaagaatca

SEQ ID NO: 291 - DNA, 1383 bp, synthetic construct
  source 1..1383: mol_type = other DNA
atgaaactgacctataaacaggctattcgcccgttcgcacgcggcccgccgctgcgtctggtccagtcccattttgcagaactgttcatccgccggcagcaaaatcttttgatgaatttttgctactccgacgaacgccgctggcgcaatattaataaaagtaccgtaccggcggaaattcagcgctggaaagacattgatttccgtaaagcggaaatcaaggtgaaaaaattgcaacgtcgtatcgcttccgcgtgggcgaacaaaaactttaaaactgtcgatacccttcagcataaacttattcactcgttctctgcgaaagcgcttgccgtaaaaacggttgttgataataaaggcagtcgcacccctggcgtcgatggtgtgatctggagcgaccttcgccagaaactggatgccatctatcagttgcgccgtcgtggttataaacccatgccattacgccgtgtttatgtcccgaaaaaggacgggacgctgcgtccacttagcattccgacgatgcgggaccgcgcgatgcagatgctgtgcaagatggcgttagagccaatcgccgaagcaacagccgacaaacgttcgtttgcgtatctgtcgggtcgtggcgcacgtgaggccattatttgtctgaaagttactatgcgtgacaacccccagtttcgctgggttatgaaggctgatgtggcaggctgctttgataatattgatcattcttggctcctggagcacattccgattgatcgtaagattctgtaccggtttctgaagtgcggctatattgaggatagtacattctacccgaccgaacgtggtgtgccacaagggggatgcattagcagcgtgttatgtaacatgacgctggatggattggaaggtttgctgaaacagcagtttgggctgagtgtatgtatgattcgttacgcggatgatatcatcatcatcggtgaaagccgcgagattctggtacaagccgtgactccggtgattgaatcattcctcgcggaacgcgggttagcgctcagcaaaaagaagaccggttattatcctgttaaagcaggcgtgtcttttctcggatggaaaacctaccgtgaccgggatcgcgtcattagcgaaccgtcaaatatcgccgtgaaccgtttaatgaacgagatcgaatctatcgcagccttggcaattgattatcacgctcaatgtgaaaaagtcagcagtaaaattcgtggctggctgaactattaccggggcatcgctcctcgcctgtccctgaacgaagtggagttctacatcgcccagtcgttactgcatatgcaggatgttgaactgctcgctggtgaaattcaatcaatcttttcagagctgctggacacgctg

SEQ ID NO: 292 - DNA, 1401 bp, synthetic construct
  source 1..1401: mol_type = other DNA
atgatccgccatcgtgataactcgagtgaatcgtggaaaacgctgccgtggaaacagctgagccgcaacctttttcgcctgcaacgccgtgtttataaagcggtacaggtgggagataaacgcaaagccaaaagtctgcagaaactgattctcaaatccaccgccgctcggctgctcgctattcgccaggtcacgcaattaaacgccggccagaaaaccgcggggatcgacggtcagacagcgctgacattcgaacagcgttttgaattgagcgagaaactgcgtaccgaggcaaataactggaaacatcaaggattgcgtgaaatccctattcctaagaaagatgggaaaactcgtatcctgaaagtgcccaccatcgcggatcgtgcgtaccagtgcctggtcaagtatgcgttggaaccagcgcatgaagcaaccttccatgctcgttcatatgggttccgtacgggtcgttccgcgcacgatgcacagcgccaactgttcaactcgctgaacagtcaagccaacggcatcgaccagcgggttattgaactggatatcgagaaatgctttgatcgtatcaatcacacagccattatggaccggttaattgctccactgagcattaaacagggcatttttcgttgtctgaaggccggcgttaatcctgaatttccggaactgggaactccgcagggcggtgtcgtgtctccactgcttgccaatattgcgttaaacggcattgaatcgattcatcgttatcatcgtgactcaaacaaacgcattaccgataaaaccagcgcagaaagcattatcgaaccgtctgtgcgttatgctgatgatatggtcattatcttgcgcccgcaggacgatgcaaccgtgattttggacaaaatctctcacttcttagccgagcgtggtatgaaagtatcagaaaaaaagaccctcgttaccgcagcgaccgatggttttgactttctgggctggaactttaaggtacaaaataatggtaagtttaagtgtgtcccgagtgtcgacaattacaaggcctttcggaaaaaagtgaaagcgatcgttaataacagcaactacggggcaacgacgaaagcagagaaactcgctccggttgtacgcggctggcgcaactatcaccgcttctgtaaaatggatggcagccgcttttcactgtggcacattgaacatcgcgcgtttaaagttttcaattctgaaactaagcagaattgccacacgtgcaaacaactgcttaaaaaagccttcccccaagtgccatacagtgagaacaagtatattaatgtgacgggtgaaaaatccccgtacgacggtgatcttacttacggcagcgagcgcaattccccgttagtgatccgccagaaatatctt

SEQ ID NO: 293 - DNA, 1821 bp, synthetic construct
  source 1..1821: mol_type = other DNA
atgagcacggcgtcttcccctctggtgtacgaatggaatgatatcccatggcgtagcatcgaacggaaagtattcaaacttcagaaacgcatctatcaggcagcacagcatggcaataaagtggcaatccgtaaactgcagaagctgctgctgtcgtcctggtatgcgaagtgtttggccgtgcgtaaagtcacgcaagaaaataaaggtaaaaaaacagctggggttgacggaaaacttgcactgtccccgaaacagcggatccgtttagtacaaacgctgtccctgaaaccaaagagtacccccgttcggcgtgtatggattccgaaacgtggcagcgatgaaaaacgtccgctgggcatcccgactatcgagaatcgggctcagcaagcactggccaaaatggccttggaaccggaatgggaagcacgctttgaacctaattcttatggctttcgtccgggtcgctcggcgcatgatgccattgaggccattcagcagtctattaagtacacgcagaaattcgtgttagacgccgacattgccaagtgttttgaccgcatcaaccatcaggcgttactggaaaagctggaaacgttcagtgtgatgcgccgcgccgttaaaacgtggttaaaagccaaaattatggatggggatgaactctttccgtcagaggaaggtactccgcaagggggtgtgatttctccattattggctaacattgcgctgcatgggctggagacagcaattaccactgcttttcctaaaacagtaaaaatcgatggcattattcacggccgctatcaaccacgtgtggttcgctatgcagatgactttgttgtcctgcacgctgatttgaaattagtggaaaaagcgaccagtattgcccaggagtggcttagcggcatgggcctcgagctgaaaccaagcaagacccgcattacccacactttcaaaaaacacgaaggaaacgtgggttttgattttctggggtttcatgttcgccagttcaaagttggtaagtgcaattatcgtacctcgggccatagccgtattctcgttgacttcaaagcgatcattaaaccgtccaaggaagcgatcgcgcgtcattaccgccaagtggccgaggtcattgaacgtaacaaaagtgctgagcaggcgaacctgattcggttgctcaacccgaaaatcgttggctggacaaactactattcaaccattgtgtcaaaggcggtcttcagcaagctggatcatcttgtcacgaaaaaacttctccgttgggcaaaacgccgtcatcaacatcagtcacgtcgccagaccgtccgcaagtactggaaattttcagaaaaagggcgtggttggatctttcaggcttcggacattagcattctgcgttggtatgcggacgtgcccattaaacgccacgtgcaggtcgcgggcaccaaaagtccgtttgatggaaactgggtatactggtctaaacgtctccagcactatccgctgttgactttccgccaggcgaaacttttaaaagagcaagagggtaagtgccgttggtgtcgtctgtactttaaacaaggagatcgtatcgaagtcgatcaccgcatcccgcgccgctatggcggtcgtgatgaatacggcaatctgcaaatgctgcacgttcattgccacgatgaaaaaaccgcgatcgatggcaccatcgacagtgttggtcctgattcgattgacgtaaacgattatgtgattgaagaaccgtgcgaagtggagagcttgacccatggtagcgaagatgaagccttcggtcgtcccgacgtcctggta

SEQ ID NO: 294 - DNA, 1659 bp, synthetic construct
  source 1..1659: mol_type = other DNA
atgcagaccatgcgcaacgcgaatgtgaccaaacgcacgacagattggcgctctatcaattggcgtaaagcgtatcggatcgttcgtaatcttcgccaacgtatctttaaagctacgcaaaaaggaaacctgcgtaaggtgcggtcgctgcagaaattgatgatgaagtgttactcaaatattttactcgcagtccgccgcgtcacgcagattaaccgtggcaaaaacactccgggcgttgataaactgattattaaaacaccagaggctcggggtattttggtagataccttatccttattcattccgtggaaaccattaccgacaaaacgtgtgtatattccgaaaagtaacggcaaaaaacgtcctcttggcattagcactattattgatcgctgtatccaagccattgtaaaaaacgcgctggaaccctactgggagagcaagtttgaaattagcagttacgggtttcgtcccggacgttcagcccacgatgcgatcgaaaaaatctatcttaccgcctgtccgcatcgccgtaaaaaatgggtactggacgcggacatcaaaggctgctttgacaacatctctcatgaattcttaatgaaaacgattggaaattttccagcccgtaaactggtgtaccagtggctgaaagctggttatgttgaacaaggtgaatattttcatactagctcgggcaccccgcaggggaatattatttcaccgttgctggccaacattgcgttgcatggcatggaagaagctctgggtattaagtataataaccgcagcgaaattgttggcaatcgtgcattggtgcgttatgcagatgattttgtgattttttgcgaaactaaagaagatgccgaacaagcccagaccgcgctcgagaaatggctgaacttgcgtggcctggagctgagcaaggaaaaaacccgcatcgtccatctgaaagaaggtttcgacttcctgggtttcaatatccgccagtaccaggtcaccaatacgaaaaccgagtggaaactgttaatcaaaccttccaaagagtctatcctcaacatccgtaaaaaactccggcaagaatggcttaacctgaaaggtcataacgtgaactcagttattgagaagctcaacccaatcattcgcggcgaggctaactattttcgcattggcgtggcgtcggaagcattttccgcactggatgattggatgtttaaacgcgaatgcaagtatgtaaaccgtactcacccgaaaaaaaataagcagtggcgtgcgaataagtattgggggaaacttaatctggaacgcaatgataagtgggttttcggggacaagaacaccgggaaacatatcctgaagttctcttggttcaaaatcaagcgtcacaaacttgttgtcggtaaaagttcccccgatgatccggcgctgcgcaagtactgggaagaacgtgaaaaagacaaaacgtcgaatcatcctaagagtatccagaaaattgcaagcaaacagggtcatacctgtccgatttgcggtcagtccctgtacaatggcgaggagatccacaaacaccacaaaacgccgaaaagcaaaggcggaaccgacaactacagtaacctggaactggtgcatctgtattgccaccagcaaattcactcgggtaca

SEQ ID NO: 295 - DNA, 1671 bp, synthetic construct
  source 1..1671: mol_type = other DNA
atgaccaaactgaatcagaaatggcacaacattaactggaacaaaacctcgaagtacatcaagaatcttcaggaagaactggtggtagcgtacaagaacaacgatcaaaaactcttattctcattacaggaaaaactgatgatgtcatttgaaggtcgtgctttagctgtacgccagattgttaccaacgatggcaaaaaaacgccagggttcgataagattatctggaattctcctagtgcgaaactgcaggcgattttacaactgcgtgaaatcctcattcagaagtctggtgattaccaaaccggcccggtccgtcgtacttggattccaaaagatcagagcgacgaactgcgtccgctcggtatcccgaatatgattgatcgtggtctgcaggcattggtgctgatgtgcctggatccgattatcgaagaaatgagcgacacctatagttttggctttcgcaaatatcgcaatactggcaatgcgatccagcgcattcgtacaattctggataaaccgaaaggtccgaagtgggtttgggatgccgatattgaaaaatgctttgacaaaatttcccacgaattcttggaaaaagagacgaaacttattgcatgcccaaaggcttacgaatatattatcaagtggttaaaagcgccgatcatcaataaaggcattaagaccttccccagcgatgggacgccgcagggcggcatcctctctcctctgctgtgtaacattgccttaaacggattggagaacgccgtgcgtgatggcctgccctctccgaatagtagtgaaggccgtaaaatttccggttcgtgggttattcgttatgccgacgacttcatcgtaaccagcccgtgtaaagaacggctggtcaaagaacacattcctcgcgtatcgttttttctttcgaaacgtggtttgaacatctcggaaaaaaagtccaaaatccgttctttggaaaacgaaggcttcacatttctgggatgggatgttacactgaaaagccgcagcctcaagcgcaataagagtaaaaccaacaaaaaagtgctgattatccgtcccagcaaaaaaagcatcaaaagtttcaaacgcgagattaaagataagtttcgcagcaataaaccgattcgggcactgatctcagagcttaacccggtgctgcgcggctggacgaactactatcgcgattcgtatcactctcaggaagtttttcaatcaattggacattatattcaccaattgtggtggaaatgggcgcagaaaaaacatccgaagcgcaataaaaattggatctacaatcgttatatcttcaatacggagaagaactcctggcgtatcggggagtccaaagacattatgctgtttgacgtgattcaggcgaaacagcttcggattaaaagcttacgtaataacgtcaacccatatctggatgaggactactacattcagcgcactgtcattcgtgacagcgaaaaatttcgcgttgcaatctacaaaaaacaagattttcggtgctatgtgtgtgagcaatccctgtatgggagtgaggaagtgcatcttcatcatctgattcctcgtaaagatggtggtcaatatactctggaaaacatcgtcccagtgcatgccacctgtcatgagtcaatcacgtatacccgcaaagac

SEQ ID NO: 296 - DNA, 1497 bp, synthetic construct
  source 1..1497: mol_type = other DNA
atgtcagtgtccgaacccgaaatcacatcggtcactgaccttaccgataaagaactcacgttacaatggaaaaccatcgactggagtaaagccgaaggtattgtcaataaccttcagagccgtattgcatcagcggcaaaagaaggaaattggaaaaaggtttcgaaactgtctcgtctgctgactcacagttattatgcgcgggctcttgcggtacggaaagtaagcaccaacaaaggtagtcgtacacctggcatcgatggcgtgttatggacctcttctggtgataaaatgcgcgcggttttacaactgaaaagcaaagggtaccacgccaaaccgctgaaacgtaagtacattctgaaaaagaatggtaaactgcgtcccttgtccattccgacgatctacgatcgcgctatgcagactctgcatgctctcgctttaggtccagtggaatcagcgacaagcgataaaacgtcctttggctttaagccttatcgtagcaccaaagatgcatttgcatatcttaatatctgtctgtctaaaaaaaacgcgccgcagtggattgtcgaaggggatatcaaagcctgctatgacgaaatctcccacgagtggatcctggccaacacattgatgaacaagaaagtcctgaaagaatttctgaaatccggatacatcgaaaattatcacctgtttccaaccgagaatggcacgccgcaagggggcactatctcgccgatcatcgcaaacatcgttttgaacggcctggatacgattctcgcggaagtgttctattcttggaacaacggaacgattgacaagaaacatcggaacaaacatcgcgtgaactttgttcgctttgcggatgatttcgtaattaccgctgatagtccggaaaccgcccacaaaattctggacattgtgaaaacgttccttgagccacgcggtctgaccttaagcaaagagaaaaccttggtgacccacatcagcgatggctttaccttcctcggttggaatttccgcaaatacaagggtaaactgctgactaagccgtcgaaagaaagtcagaaagatattatcacgaaaattcatgacgtcatgtataaagcccgtgcccgttctcagagcgagctgattcgcctgttgaaccctattattcgcggctgggcgcaataccataatcatgcgatttcaagcgcaatcttcaaaaagttagatcacattatgttcatcatgctcgttagctgggcgcgtcgtcgccacccgaataaagggtttgcatggattatggccaagtattggcatcgtatcggcaagtggaaacatgccttctcgacagactcacagaccctggagcgcttttcgaatatgaaaattatccgtcatcgtttggctaaactggacaaaaatccgtatattgaccgcgattactttgaacgttggcgggtgatcgagcattatcgcaagaaacagattagctacagtaagagttccctgaac

SEQ ID NO: 297 - DNA, 1695 bp, synthetic construct
  source 1..1695: mol_type = other DNA
atgaatgatatcaaaacgagctgcgccagtacagatcgtaaaattgttgcgtgggattcaattgattgggacaagtgcgaatatgaagtgcagaaactgcaagcacgtatcgtcaaagcccaaaaagatggtcgctactgcaaagtaaaggccttacaatggacgctgacccattcattttcagcgaaagctcttgcagtgaaacgcgtgacctctaacaaaggtaaagaaacaagcggtgtagatcgtgttctgtgggattcgccgctgggaaagtggaaagcgattagtaccctgaaacgtcgcggctactgcccattaccgctgaaacgtgtgtatattaaaaaaagcaacggtaaacttcgtccgctgggcatcccgaccatgaaagaccgggcgatgcaagcgttatatctgatggccttggatcccgtggcagagacaacggctgataatcatagctatggctttcgtaaagaacgcagcacagcggatgccattgtacagtgtttcattgtgctgtcacgtacggtcgcaccggaatggatcttggaagcggatatcaaagggtgctttgaccatatttcccatgagtggctgctcaacaatattccgatggaccgggttatgctcaagaaatggttgaagtgcggctttatctttaacaaaatcttaaacccaacggaagaaggaaccccgcaaggcggaattatctcgcctactctggctaatatgaccctggacggtattcagaagcttctgcaggaacgcttcaaaaaacgcaaagttaaaggcgtcgaaatctacccaaaaattcaccttgtccgttatgcggatgatttcattattactgggcgtactaaagaagttctggaaaatgagatcaagcctttaatttgcgagtttctggccgagcgggggttgaccctgtccgaagaaaaaactaaaattacacacattcgcgagggcttcgacttcctgggtttcaacatccgcaagtttaataataccctgctcaccacccccagtgagaaatcgatcgaaaaattcttggagaagattcgcaccattatcgaaacgaagaaatccactaagcaggagagcctcatccgtgtacttaacccgatcattaaaggttggtccaattattatcgcaccggcactgctgcaaaaagttttcagcgcgtcgattgggaaattttccgcaaactttggcagtgggcgcgccgtcgccatagccagaaatgtaaaggctgggtgaaagaaaaatactatcgccgtatcggtaaccaggcgtggtgtttttctgctgaaaaagagatccagaaaaagggcgaactgaaatatgtgcagttggtccacctggcagccgttaaaaccaagaaacacgtgaaaatccgccatgacgcaaacccgtatgacacgaattataagtgttactttgaagaacgtgccacgcgtaaaaaactggaagccttaaaagggaaaagttcctcttggaagtatgcgtgggagctgcagaaacggaagtgtcctatctgcggcgagacgctgaacctgaacaatgactggaaaatttcgaagcaatttgtggatggtaaactcaaagaacgtatctaccatgaagactgttactataacgatgttcacccaaccaaaaaaaagtactacgaaagcgtgtctttacagaaactg

SEQ ID NO: 298 - DNA, 1296 bp, synthetic construct
  source 1..1296: mol_type = other DNA
atggctagcgcatggagtcatcctcaattcgaaaaatccggaatgtcgaacaacgtgagcccttacaaggccgtccgcaccatggaaagattatccgaagcatggaaacaagtatacaagaatggtatcaagtccacgtctattgataccaagaatgagatccttgagtttaagaagaatgagattaagaacttgcggaaaatccaacgtctcctgcaacagaataagttcaagtttgaaaacagtcgcggaattctgcttaagcggaaggggaaggatccacgtccaatagtaatagcaagtgtacagtctcgcatagtgcaacgttctatactcgatgtacttcaagagaactcaagcattaagaagtactacctttctgtgcctacgagctacggcgcaataaaaggtgaggacaaaggggtgcgtaacgcaatcatagcgactatcgaagcaatcaagaacggcgcggaatacttctacaagagtgacatcgcctcgttcttcacgaagattgcaattccgaaggttatcgaagttatatcaacttttataccggacaaggatttcgtggagttgttgcgcaacgcgacgatcttagaaatatctaatcttaacgatttgggcgatctgaagcactactttattttcgatgatatcggtactccgcaaggctgctgtttgtctccactcctgggtaacatatttctggccgagtttgataaggaactgaacaagaatgacatcatttgtttgcggtatctggacgacttcattctgttagcaccaacagagaaggcagtacgagcggcattccggcgcgcttccaagattctggccaagttgtctcttgaagcgtatacagccgtatcagatccaaagaaagcgaaagtaggctactacaaacaaggctttgagttcttaggcgtagagatcttaaataaattaatccgaccaaacaaggcttcatgcaataagttgctgaacgagatcaaggagattataaagaacagcctggagatgaacttctcaatgactcaatccttatacaaagaggagtactctgttactaagacgctctatcatattcacaataagattaagggttggggcaaccaatactacttttgcaacgaccgaaacatcttcatcactcttgacgagaaaatttcaggggagatcgatcgttacctgaatagtttccttttgaaacgggagaagctcgacgccaagcagaaacggaaacaattaggtatccaccttttaatcgactctaagaatgtaccaataacctga

SEQ ID NO: 299 - DNA, 1362 bp, synthetic construct
  source 1..1362: mol_type = other DNA
atggctagcgcatggagtcatcctcaattcgaaaaatccggaatgaaccaacagggtcaccgtcacttgtctagtctgtcacttgaagtacggaagcggcgtacgttggaagatgcttgggcggctatccgtgcgaacgcccgggtgagtaaatctgccgacacccgtaaagaaatagaagcgtttgaggcctcattatccagtaaccttcggcgtataagctcggaacttcagaagggtaagttcgccttcgccccggcgaagggcgtcaagattcctaaaggggcggataagcgtcagttccgtcctttggtggtagcgcgtgtagaaagtcgagtggtgcaacgcgcgattcatgacgtactttcagaggttcctgcgttacagccattaatctataccccacactcctttggtggcgtaaagaagaagcgaaagggagaactggcggcggtgcctgctgctatccaggccgttctggacgccataaaggctggcggcacctatttggtccgaagtgacattagcaagttcttcacacggatccccaaatcaagtgttacgaatcttgtcgctaacgccgtcgacgatgtagactttatctcactgttcgagtctgctattaaagtcgagctggagaacatggcgcaattgcgtgagtctgcatcggcctttcctattgaggacataggcttagctcaagggaattgtctgtcccccttacttggcaatttatttcttcacagcttcgacgaagagatgaatcgccaggcaggggtccgctgccttcggtatattgacgacttcattgtaatcgggacttcttccgagtgcgccgagaaggcgttttccctggctacgcaacgtctgaagacgttggggatggagatttcagcgggtaagacaaaagagggcagagtaagagatggtttcgagttcttaggcatccaccttagtccaggcctcatccgtccgagtaagagctctcgtgaccgcttaatacaaagcgtgaaaagtgcatttgacgagtctaataagggcatgcttggcgcgaagaagggtagcgctatccttaagagccaatctctgttagaaacgttgtgtcgagtcggtggtatcatccaaggttggggtaagcactatcgtttctgcaacgaccaggagacgctccgtcagttagatgtcaagattgaggcattgctgaagcgatacttaggaatatatcgagaggcacgggatactgtcggtggcgctactaaatggaacttactgggcatcgagagcttggcccaaatcaaacgtacccccttttcttggccagaggtggagcaaaagcaaagcgcgagtagcgctgctaagtga

SEQ ID NO: 300 - DNA, 1356 bp, synthetic construct
  source 1..1356: mol_type = other DNA
atggctagcgcatggagtcatcctcaattcgaaaaatccggaatgaagacgctgctgcaggacgtccgatctgaacaaaacattttcgctgcgtggcgacacgttaagtcttccgcaattaatagtcgtaatgatgatatccgcggggctgcgagtgcctttgaacacaatcaccagaagttcttacggcgtattatcctgcaactgcgtgctggaacgttcgaatttcccgcggccactggggttttgaaagacaagaagttgcgtgccagtcaaaacaaggcgccgcgtcctattgttgtcacagatttggagactcggatagtccagcgagctttgttacaggttctgcagcctcgtgaaacgctggatcctcgatcgcgcaatagctcccttcgcattaagaaggacgagagactgggctcgctcaacgacgttaacgtatcaaaatacggcgtcggcggtctgattgcacctcatggcggcgttgagagtgctattcgtttgattacgcacgcgatagattcgggcgcaaattactacttcagaagtgatatcgaggctttcttcactaagattcccaagtctaacgtggtcgagcgcattgccatagaaacccgtgatatggacttcgccaaccttttcgcccgcgccctcgaagtcaagcttaataacattgagcaaatcggacctttcgagtatcttttccctactggcaaggaaggcgtagcccaaggatcaccactctccgcgtttgcgggaaacgtgctcctctaccaactggaccaagagctcaacgcccttgatgttacggcggtgcgctatatagacgatattctgattgtggctcaggatgttgaccgacttaatcaagcgattgactacgccgagcaatctttgagtaagcacggtatgaaactgtacgaacccaaggccggatcttcaaaggcagcgaagggccgttgcgacaatggcattgacttcttgggttgtttcctgcaaccaaacaaatgtatcccatctgccgactcgatagctcgtttcaagagtagagtgacgtccgagttgagtgactccaagagtcgtattaaagatgctttaaaagtgggaaagttactggacaagcgattcagcaccacagccacgctggaccgtgtcttcaactacgtctatgggtggcaaaaggctttctctttctgtagcgacgtggtgccgttcgaacaactggaccgtttcgttcgccgccagattttagactacgagatcgctgtacgaagaatcgtgaaggacagcagcgatgagagccagacgatggtcatggggctgccttctatgcgtcagttgcacaagggatga

SEQ ID NO: 301 - DNA, 1284 bp, synthetic construct
  source 1..1284: mol_type = other DNA
atggctagcgcatggagtcatcctcaattcgaaaaatccggaatgtctcgactttataaggacatctgctcgcaacgcaccctgtatggtgcttggcgtaaagtacgtagcagtgcattcttctcgagcagtgatgagattaagcgcgaggccgaggagtttgaatcacgtttgccggactcgttaatcgaaattcagcgtgcgcttagcaagcaagccttcatatttctccaacaaacaggtgttgcacaaaagaagccgggtggcaaaagtcggccccttgtgttggctccgatccctaatcgggtcgttcaacgggcccttctggacgtgttacagcgtaaggtccgcttcatcaagcgcgttctcataactcctacatcctatggcggaattcccgagaaacgcgttgcgatggctatcgccgatgcgcgtaaggctatgttggcaggtgcgcgattccacatccgttcagacatcccggcgttcttcacgaagatcaataaagaccgtgtactggagatactgcgtcctcacctgaattgtgcggcgacattaaaactgttcgaagaggctattaagacagatttagctaacattgacgacttgcgccgtcgtcgactggacgacatattcccgcttgggattgaaggggttgcccaaggatcgcccctgagccccctgctcgcaaacatatacctcgcagacttcgaccaaaccatgaactcgaacgggataacctgtctccgttacattgacgatttcttattactgggcgccagcttgtccgacgtagacaaagcttttaatagatcgcttaaggaactcggcaagattggactcggcgcttacgacccacgcacgaacaaggccaaggcatcgagaggtacgactgacacgggcttcgactttcttggttgcaatgtctcccctgggcttgttcaacctagtgaagctacgcgcaagcgtttcaagatgaaattagatgccgaattcgcgacagctagtcgtgcattaagatacaatgcgcagaaccgcgacggagatggcaagtattcgtacagttcggcgttatatcggattgacaaaatcatccttggatggggtaaggcattcactttctgcaatgcgtcacaaacgatgaaggccctggacgatttcgtatcccagaaactcatgaccctggaagctgagaagaacgcagtgttggccagatcaaactctgaggctcggcgaagagtccttggcgtacgacttcttacgtatgttgcgtccccagcttga

SEQ ID NO: 302 - DNA, 1305 bp, synthetic construct
  source 1..1305: mol_type = other DNA
atggctagcgcatggagtcatcctcaattcgaaaaatccggaatgtcattcacactttatgaggaagttagtgatcaggatactctggctgctgcttggcggcacgttcgtagatccggtatgctttcgcaatccgaaaagacgaaggaaagcataaaagcatttgactccgacattgatacccaactggcgaagatcgcctcgctcctcagagaacacagtttcgattttgggactgccaaaggtgctcctataaaacgcccgggcaaggagccgcgtccccttctggttcctgaagttccagcacgaatagtgcaacgttctctgttagatacacttcaaaaccagccggggatacaagcttatgtggatcacccttgctcatacggcggcttaccgaagaagaaccgcgcggacgcaatccgccacgcttgtgaggctattgctgatggcgccacctattttatacgtagcgacattcacggcttctttaccggcattctgcgccaaggagttttagacacgatacaagaaaccctgagagacgacagtatcgcatccctgcttaacgaagcgacatctatcgaaatcggtaacgctgaagagattcaaccttacttgcatttattcccagactacaacgaaggaatcgcgcaggggtgttgtctgagtccccttttcggaaacatttatatgcatcaattcgacgaggagatgaaccgaggggacgtcgtgacattacgttacattgacgatttcgttatcctgggtcaagacagagagtcaaccgagcaagccttccgtcaagctcggagaatgttacaagcactgaatctttcagtttaccgccccggggacggaagcagaaaggccgcggaaggctcaattaagagaggcttcgaatttctgggttgtacaatcacaccccactgcgtggagccgtcaagagcagcgcggtccgcgtttcttgaacgagtgcggaatcaattagacttagctgcgcacgagatgcgtgcaggactgcacgagctcccagagcactaccggtctagcttagtgcagaccctttcgcgtatctctcggatgatcagagggtggactgaacagtaccgattctgcaacccttcagacgcctttacaagtattgacgtcaaggtagatagaatggtaggggcgtatttaagatctttctttaagcattacaagaagtgcaagagatctcccgccgtacgtcgtcgccttctgggaatttggttggctacggactccagccgtactccgatcctgccgatccgctccaagtga

SEQ ID NO: 303 - DNA, 1251 bp, synthetic construct
  source 1..1251: mol_type = other DNA
atgtcgaacaacgtgagcccttacaaggccgtccgcaccatggaaagattatccgaagcatggaaacaagtatacaagaatggtatcaagtccacgtctattgataccaagaatgagatccttgagtttaagaagaatgagattaagaacttgcggaaaatccaacgtctcctgcaacagaataagttcaagtttgaaaacagtcgcggaattctgcttaagcggaaggggaaggatccacgtccaatagtaatagcaagtgtacagtctcgcatagtgcaacgttctatactcgatgtacttcaagagaactcaagcattaagaagtactacctttctgtgcctacgagctacggcgcaataaaaggtgaggacaaaggggtgcgtaacgcaatcatagcgactatcgaagcaatcaagaacggcgcggaatacttctacaagagtgacatcgcctcgttcttcacgaagattgcaattccgaaggttatcgaagttatatcaacttttataccggacaaggatttcgtggagttgttgcgcaacgcgacgatcttagaaatatctaatcttaacgatttgggcgatctgaagcactactttattttcgatgatatcggtactccgcaaggctgctgtttgtctccactcctgggtaacatatttctggccgagtttgataaggaactgaacaagaatgacatcatttgtttgcggtatctggacgacttcattctgttagcaccaacagagaaggcagtacgagcggcattccggcgcgcttccaagattctggccaagttgtctcttgaagcgtatacagccgtatcagatccaaagaaagcgaaagtaggctactacaaacaaggctttgagttcttaggcgtagagatcttaaataaattaatccgaccaaacaaggcttcatgcaataagttgctgaacgagatcaaggagattataaagaacagcctggagatgaacttctcaatgactcaatccttatacaaagaggagtactctgttactaagacgctctatcatattcacaataagattaagggttggggcaaccaatactacttttgcaacgaccgaaacatcttcatcactcttgacgagaaaatttcaggggagatcgatcgttacctgaatagtttccttttgaaacgggagaagctcgacgccaagcagaaacggaaacaattaggtatccaccttttaatcgactctaagaatgtaccaataacc

SEQ ID NO: 304 - DNA, 1317 bp, synthetic construct
  source 1..1317: mol_type = other DNA
atgaaccaacagggtcaccgtcacttgtctagtctgtcacttgaagtacggaagcggcgtacgttggaagatgcttgggcggctatccgtgcgaacgcccgggtgagtaaatctgccgacacccgtaaagaaatagaagcgtttgaggcctcattatccagtaaccttcggcgtataagctcggaacttcagaagggtaagttcgccttcgccccggcgaagggcgtcaagattcctaaaggggcggataagcgtcagttccgtcctttggtggtagcgcgtgtagaaagtcgagtggtgcaacgcgcgattcatgacgtactttcagaggttcctgcgttacagccattaatctataccccacactcctttggtggcgtaaagaagaagcgaaagggagaactggcggcggtgcctgctgctatccaggccgttctggacgccataaaggctggcggcacctatttggtccgaagtgacattagcaagttcttcacacggatccccaaatcaagtgttacgaatcttgtcgctaacgccgtcgacgatgtagactttatctcactgttcgagtctgctattaaagtcgagctggagaacatggcgcaattgcgtgagtctgcatcggcctttcctattgaggacataggcttagctcaagggaattgtctgtcccccttacttggcaatttatttcttcacagcttcgacgaagagatgaatcgccaggcaggggtccgctgccttcggtatattgacgacttcattgtaatcgggacttcttccgagtgcgccgagaaggcgttttccctggctacgcaacgtctgaagacgttggggatggagatttcagcgggtaagacaaaagagggcagagtaagagatggtttcgagttcttaggcatccaccttagtccaggcctcatccgtccgagtaagagctctcgtgaccgcttaatacaaagcgtgaaaagtgcatttgacgagtctaataagggcatgcttggcgcgaagaagggtagcgctatccttaagagccaatctctgttagaaacgttgtgtcgagtcggtggtatcatccaaggttggggtaagcactatcgtttctgcaacgaccaggagacgctccgtcagttagatgtcaagattgaggcattgctgaagcgatacttaggaatatatcgagaggcacgggatactgtcggtggcgctactaaatggaacttactgggcatcgagagcttggcccaaatcaaacgtacccccttttcttggccagaggtggagcaaaagcaaagcgcgagtagcgctgctaag

SEQ ID NO: 305 - DNA, 1311 bp, synthetic construct
  source 1..1311: mol_type = other DNA
atgaagacgctgctgcaggacgtccgatctgaacaaaacattttcgctgcgtggcgacacgttaagtcttccgcaattaatagtcgtaatgatgatatccgcggggctgcgagtgcctttgaacacaatcaccagaagttcttacggcgtattatcctgcaactgcgtgctggaacgttcgaatttcccgcggccactggggttttgaaagacaagaagttgcgtgccagtcaaaacaaggcgccgcgtcctattgttgtcacagatttggagactcggatagtccagcgagctttgttacaggttctgcagcctcgtgaaacgctggatcctcgatcgcgcaatagctcccttcgcattaagaaggacgagagactgggctcgctcaacgacgttaacgtatcaaaatacggcgtcggcggtctgattgcacctcatggcggcgttgagagtgctattcgtttgattacgcacgcgatagattcgggcgcaaattactacttcagaagtgatatcgaggctttcttcactaagattcccaagtctaacgtggtcgagcgcattgccatagaaacccgtgatatggacttcgccaaccttttcgcccgcgccctcgaagtcaagcttaataacattgagcaaatcggacctttcgagtatcttttccctactggcaaggaaggcgtagcccaaggatcaccactctccgcgtttgcgggaaacgtgctcctctaccaactggaccaagagctcaacgcccttgatgttacggcggtgcgctatatagacgatattctgattgtggctcaggatgttgaccgacttaatcaagcgattgactacgccgagcaatctttgagtaagcacggtatgaaactgtacgaacccaaggccggatcttcaaaggcagcgaagggccgttgcgacaatggcattgacttcttgggttgtttcctgcaaccaaacaaatgtatcccatctgccgactcgatagctcgtttcaagagtagagtgacgtccgagttgagtgactccaagagtcgtattaaagatgctttaaaagtgggaaagttactggacaagcgattcagcaccacagccacgctggaccgtgtcttcaactacgtctatgggtggcaaaaggctttctctttctgtagcgacgtggtgccgttcgaacaactggaccgtttcgttcgccgccagattttagactacgagatcgctgtacgaagaatcgtgaaggacagcagcgatgagagccagacgatggtcatggggctgccttctatgcgtcagttgcacaaggga

SEQ ID NO: 306 - DNA, 1239 bp, synthetic construct
  source 1..1239: mol_type = other DNA
atgtctcgactttataaggacatctgctcgcaacgcaccctgtatggtgcttggcgtaaagtacgtagcagtgcattcttctcgagcagtgatgagattaagcgcgaggccgaggagtttgaatcacgtttgccggactcgttaatcgaaattcagcgtgcgcttagcaagcaagccttcatatttctccaacaaacaggtgttgcacaaaagaagccgggtggcaaaagtcggccccttgtgttggctccgatccctaatcgggtcgttcaacgggcccttctggacgtgttacagcgtaaggtccgcttcatcaagcgcgttctcataactcctacatcctatggcggaattcccgagaaacgcgttgcgatggctatcgccgatgcgcgtaaggctatgttggcaggtgcgcgattccacatccgttcagacatcccggcgttcttcacgaagatcaataaagaccgtgtactggagatactgcgtcctcacctgaattgtgcggcgacattaaaactgttcgaagaggctattaagacagatttagctaacattgacgacttgcgccgtcgtcgactggacgacatattcccgcttgggattgaaggggttgcccaaggatcgcccctgagccccctgctcgcaaacatatacctcgcagacttcgaccaaaccatgaactcgaacgggataacctgtctccgttacattgacgatttcttattactgggcgccagcttgtccgacgtagacaaagcttttaatagatcgcttaaggaactcggcaagattggactcggcgcttacgacccacgcacgaacaaggccaaggcatcgagaggtacgactgacacgggcttcgactttcttggttgcaatgtctcccctgggcttgttcaacctagtgaagctacgcgcaagcgtttcaagatgaaattagatgccgaattcgcgacagctagtcgtgcattaagatacaatgcgcagaaccgcgacggagatggcaagtattcgtacagttcggcgttatatcggattgacaaaatcatccttggatggggtaaggcattcactttctgcaatgcgtcacaaacgatgaaggccctggacgatttcgtatcccagaaactcatgaccctggaagctgagaagaacgcagtgttggccagatcaaactctgaggctcggcgaagagtccttggcgtacgacttcttacgtatgttgcgtccccagct

SEQ ID NO: 307 - DNA, 1260 bp, synthetic construct
  source 1..1260: mol_type = other DNA
atgtcattcacactttatgaggaagttagtgatcaggatactctggctgctgcttggcggcacgttcgtagatccggtatgctttcgcaatccgaaaagacgaaggaaagcataaaagcatttgactccgacattgatacccaactggcgaagatcgcctcgctcctcagagaacacagtttcgattttgggactgccaaaggtgctcctataaaacgcccgggcaaggagccgcgtccccttctggttcctgaagttccagcacgaatagtgcaacgttctctgttagatacacttcaaaaccagccggggatacaagcttatgtggatcacccttgctcatacggcggcttaccgaagaagaaccgcgcggacgcaatccgccacgcttgtgaggctattgctgatggcgccacctattttatacgtagcgacattcacggcttctttaccggcattctgcgccaaggagttttagacacgatacaagaaaccctgagagacgacagtatcgcatccctgcttaacgaagcgacatctatcgaaatcggtaacgctgaagagattcaaccttacttgcatttattcccagactacaacgaaggaatcgcgcaggggtgttgtctgagtccccttttcggaaacatttatatgcatcaattcgacgaggagatgaaccgaggggacgtcgtgacattacgttacattgacgatttcgttatcctgggtcaagacagagagtcaaccgagcaagccttccgtcaagctcggagaatgttacaagcactgaatctttcagtttaccgccccggggacggaagcagaaaggccgcggaaggctcaattaagagaggcttcgaatttctgggttgtacaatcacaccccactgcgtggagccgtcaagagcagcgcggtccgcgtttcttgaacgagtgcggaatcaattagacttagctgcgcacgagatgcgtgcaggactgcacgagctcccagagcactaccggtctagcttagtgcagaccctttcgcgtatctctcggatgatcagagggtggactgaacagtaccgattctgcaacccttcagacgcctttacaagtattgacgtcaaggtagatagaatggtaggggcgtatttaagatctttctttaagcattacaagaagtgcaagagatctcccgccgtacgtcgtcgccttctgggaatttggttggctacggactccagccgtactccgatcctgccgatccgctccaag

SEQ ID NO: 308 - DNA, 1458 bp, synthetic construct
  source 1..1458: mol_type = other DNA
atggctagcgcatggagtcatcctcaattcgaaaaatccggaatgaagccgattataatcgaagacggtcggacgatagtgttagcccgtgggtacttctcgccccacagatacgggacgggtcgattcggcggcttcaatcagattcaggacgggctccttgcagaccctgagctgctgcgtcaagttgtatccaccatcatgtgcccagaagagagaacgttgattcctgagaatgacttctatcctgaatgctgggagccagagaagtatgaagcggatggtccgcttggctccatagacgctttcttcactacgttccgccgcatcgccagacacgatatgtactgttccactgttgagcaaggcgaatgggtcatggcttacggtacggaacaacttacctaccggcgaatgaaccggccactcgacgacaagcatttccgtttaaagtcaatccgattaccggacgagagcgaccgggcgttggtcaagaagtgctttgaatttcgcgtggcacccgccatcacgcattgcttaatcgtgggtcgggcattcatgcgtgaggacaaaccgatgtataagcacttcaagaaacgcactaccagcaaagtgcgtgatatttgggcaccggagcccgaggtaaaggcagccttacgtcatttattgcacccgctgaattcggcgtacgacatgaagcggtctggttcaccgcaatacgcttacacaaaagaccgcaatatcttaatgaacgcggagccgcacgcacgcaacaagtggatgcttaacgcggatattacgggcttctttgatcactgcgactgggacctggttaagggttacatgagattcctcatgaaagacatctccgctgaagacaaagctgttcttaaagttatgttaattaacccagccacgggtggcctgtaccaaggtagtcccgtatcgggagctctgtcaaacgcgatcctcagacccgcggccaagtacatgaaagctttctttcaaaaggaaggacgtaccctgaccgtatatgccgatgacataactgtgtctcagggagcagccatcgattcaacagttcgtaagaacatcgtcggtaaaattcgtcatgccttcgagaagttcgacctgccgtttgaccttaagccgtctaaaacacgtgttagcagaaacaacggtcggaaagtcaccggtattagaatcaaccatcttgatcaatgcacgatcccactgccgaagtatagattgttgcgttcgatgctgcaccgtatgagttcgggtggtgacgtgaccatggcaaaatcccaacttaaggggtatcttgagttcgcgcgattcaatgatcgttccggtaagattgaccgtttgatcgacaagtaccgcgacgtcttggtggacaagggcatgataagaccaattctggacccgcagccagtagagatccctgaggagtga

SEQ ID NO: 309 - DNA, 1668 bp, synthetic construct
  source 1..1668: mol_type = other DNA
atggctagcgcatggagtcatcctcaattcgaaaaatccggaatggatgacaagaacaagttgtacctgattaatgatggaaagacgatcgtaacccgtttcggtgcaatcactccattccatcaaagcaagaagtacgaggatacgttgaagatcccggaaaagtttctggaagacccggaaagtctccggcaattgatcggattcaagctcttcgaagaccgcacgaagatcataaataagaacgatttctacatgcgggacccacaagtatataagaaggggaaacaaaccacattaattagcttcttacaggcagcacataaggtgatgcgccttcactacgagaattatagagtcgaaattttcagtaagtacgtagttgtgttaaattgtcccactattaagtttaccggtacacaagtaaaagagacgtgccatatcgactcaaagacagcgaacggcgagcgaaagcctctgctgatcagtgcctgctataaggtcgaggacgatgacgaacgcacgaagatcttcgacctgctgacgcttaagtacgcccccgcgatcatagacgtgtatattactacactgcgtttggaagcggccgggacgaagctgtaccagtactataaggttccaactagcactaaggtccgggagatatgggcaccagaagatagtctgaaagattctatgcgacatctcttgttgccgctcacgtcggcgtacgacatgaagaagaagaacagtacgcaatacgcttatatcaaggagcggtcgatcgtgaacaacgccgaggtgcataaggacaacaaatatatcgcgaaattcgacattaaaggtttcttcgacttttgtaactgggatctttcttggaaatacctcaagttcctcttcccgaaggataaatacggcaagaaggccgagctgtacgacgacgtaaagaacacgttaaaacgcgtgattattaatgaacaaactggtggactgttccaagggaaccctgtctcgggtgttatttctaatgctatacttcgtccattctctaactacatactgaacatcctggaaaagcaagcagatgtcaagaatggggtgttcccgtctatcaatgagaagaatgcggagactgagagtatcgacccagagggtaacattacaaccaagttcgacgggaaggaatacaagtccttcagcaaatatacggatccgagcaacgaagacttacgttacgccgtatcagtttatgcggatgatataacggtgtcgtctaattaccctatagactggaacgaggcaaagcgcatcagcggtatattgcgatactcgttcgagcacctggagttgcctttcaagctgaacctgaagaagacttctattgcccgtaataatggtcgtaagatcactggcgtacggatcaaccataacgatgttatggttgtatcgcgggtgaagtacatgcttctcaagtcaatgtgtcaccggatcaaacacggtaagaaaatctcaatgccgaagaatgtcttccaaggcaacttagcatacgcccgtttcgtggatcacagtggaaagattgagactctcatagctaaataccacgctaacttggttgaatttggaatcaacttgaagttacccggagagcttgcggactcgtatgtcgagtga

SEQ ID NO: 310 - DNA, 1017 bp, synthetic construct
  source 1..1017: mol_type = other DNA
atggctagcgcatggagtcatcctcaattcgaaaaatccggaatgttactggaaaagctgcaaatacaatctaaccagtctctcgaacgcttagagcgattcgcaacgtcagcgtccaagcggtacaaggttttccaaatcccgaagcgttccggtggcttccgtataatagaacagccgtcaaaggagatcaaggcgatccagagatggttgatagaggcgttattcgacgaatttcccatccaccattcagcaaccgcatatatacggggcaagaatatacgatcgaacgccgaggtccacgcggagagtaacttcacattgaagctggactttgagaacttctttccttctttcacggagcgccacttaatcaagtttctgcgaaactacccattaatagaaaagaaacagataaacgacagagatataaacttcatcagccgcatctgtctgcgtaacggccgcctgacaattggtgcgccaagcagccccacaatcactaacgccatgatgtatcaattcgacactcttatgtcagcacgttgcgctgaggacaacttctcatatacgcgttacgccgacgacgtgtttgtttcttctcgttcgtacattaacgtgggtgagattatacttttcgtagagaatttactttcgaagtacgagtatgcgtcgctgcgcctgaacaaagacaagaccgcaattctctcacgtaagggacgtcgttccataacgggctgtgtgattaccccgcagcgtggtattagcataggtcgaaagttaaagaagtccataaagcacaagatctacgagagcattaacggtcgattgtcatccttagaggcaactaagttaatgggatatctcggatttcttaaggacattgagccaaattacttcgagtctctgaagaagaagtacggcgctgacgccattaaaacaatcacgtcagggaactacgatgagattaagttggttccattaatattagacgacttagacgatacaccattctga

SEQ ID NO: 311 - DNA, 987 bp, synthetic construct
  source 1..987: mol_type = other DNA
atggctagcgcatggagtcatcctcaattcgaaaaatccggaatggtgtccgatattcttgacaagatttcaaaggatctgctgtgcagtagagatgtgctgttgagaatgtaccaccgggcaccgcacgcctacaagttctacgatatccccaagaagaatggtggtgttagaagaattgctcagccagcgcgagaggttaagaaggtacaacgctgggtcgtagataatatattgtctagcgtaaaaccatcagcattttcaacagcttacctggaaggtagttctattaagaagaacgcatgcatgcacttacataacgcctacatcgccaagttcgacttcaagaacttcttctattccatcaaattctcggatgtgaagagaaccctggaagttaagtacggcatggaagaggggcaatcaaagttcatagcccgtttatgcagtgtgtcaatcgaggggaatctgtgcttatctatcggcgcgccctcatcgccaagcctttcaaatatcgtgatgtacgatttcgacgagtacttagccggaagatgcctgtcgctggacattgtgtacacacgttacgccgacgacatgactttcagctccaatgagaaaggtgtttgcttccaaattgaggggctcattgttgacgccctgagaaacaccgagtcgcccgaattagcgttaaaccacaagaagacaaacttcatctccaagaagtaccggcggacggtgaccggcttgactctgaccaacgataagaagtcgagaatttcgttgggccgcgaccgtaagcgtctgatcaaggctttagtccaccgtagcatcataaacaagcttgataaggaagagctggaaaagctgcaaggactgttaggattcgcttaccataacgagttctctttctacaattccttgtgcgacaagtacgggttcggggttgttagtaaccttatgaagcagaagtcaccgacgataacttga

SEQ ID NO: 312 - DNA, 975 bp, synthetic construct
  source 1..975: mol_type = other DNA
atggctagcgcatggagtcatcctcaattcgaaaaatccggaatggagcttataaataagcttgcaacaaagctcaataaaagcgaatctgaggttatacggtttctcgccagtgcgcctttgaagtataaagtatacacaatacccaagcgtacgagtggacaccgagtcatagcccaaccatcccgggaattaaaggaataccaacgcgccttcatctcactttacagattaaacatccacgatgctgcaatggcctaccgtgagcgcctgagcataaaagataacgccaaatttcactgcaagaaccgttacctgctgaagatagacctggaatcattcttcaactccattaccagtgagttattctggaccatttggcaacagcattatgagatgccgaataacgacgaaaaggtgctgatggagagactgttattctggagtccgggcaagagttctacaggcaaactggtattgtctattggagcaccatcttcccctctgttgtctaacttctttatgtaccaattcgatgagttagttacacgccattgcgagaagttggagattaagtatacacgctatgcggacgacctcacgtttagcaccaatgcgaagaatgtactgttcgacatgccccgatacatttccgacaccctgacgacgttatttggctccgcattaattattaaccgccggaagacggctttcagcagtagagcgcataaccggcacgtgacgggtataaccatagacaacgaatccgaccttagtttagggcgcgagaagaagcgttacatcaaacatctcgtccaccagtaccgcctgaacaagctcgataaagagaacgttttccacttaaagggtttactggccttcgccaaacatatcgaacccaagtttataacatcattagagactaaatactctgctgaggtgatcacgcaaatcttcgaggaacaacatggttga

SEQ ID NO: 313 - DNA, 1002 bp, synthetic construct
  source 1..1002: mol_type = other DNA
atggctagcgcatggagtcatcctcaattcgaaaaatccggaatgtggcgatattgtacagacgaggaagcaataagaagctttcaccttaccgacggtttgcagtgcaaggaaggaaaagagatacaaacgttattcgctgttagcaatcacgccgaagttcactaccacactgcatacattccgaagaagaagggtggccgccgcaagcttctcgtccctgacgcccttcttggacgaattcaaaagaatatcctgcaaaacgtgctcgccgaacgaaaagtgagcccatatgccaaggcctacattaaggggatgggtatcgtagaaaacgcgcttcctcatagtcacgcggagatcctgttaaagctggacattgaggacttcttcgaaaacataacgtatctcatggtataccagaaggcattcccagaaaagtattttccaccagccatacgtaccatgctcgcacacctgtgctgttataatgattacttgccgcagggcgccgtcacatcaccgatgatatcaaacctggttatgtactctttcgacgagtacataggtaagtggtgtggtgagcgcaagatcgcttatacgcggtactcggacgacatgaccttttcgggcgacttcgaggttaaggaagtgaagcataaagttcgtagcttcttggggaaaatgggcttccttttgaatgaagagaagacccgtgtgttaaaacaataccagcgacaaatcgtcaccggtattgtggtcaacgaaggcactaatatctcaaagagttacaaaagatcgatccgtcaagagatctactactgtgagaaatacggagccaaaagtcacctgcagcggcgaaacctttctgagaaggaagaggtcccttacctgaaacagttgttaggaaaggttaattatgttctgcagataaatccggacgacaagaatttccaagaagctaagaagaagatcaaggagatgctcttgaaaattaaaggatga

SEQ ID NO: 314 - DNA, 1044 bp, synthetic construct
  source 1..1044: mol_type = other DNA
atggctagcgcatggagtcatcctcaattcgaaaaatccggaatgataagtacgggactctggaagtactttaccaaggaacaccataaggaattcgtcctgagcctcggtctgctcaacgataccggatggccaattgagaagcagttacgatgtctgtacactgtttctaaccacactgaacgtcattacaccagattaacagttcctaaacgagatggcactattcgggagcttctctcgcctgatccactgttgaagaaaatccagcgtaacattttgcacaatgttctggaagagttacctgtgtccccgcacgccactgcgtaccgtcgaggtgcaggcatactcggcaacgctttcccacaccaaggccgcaagcaagtcgtgaagttggacattcgcgacttttacgggtccataacttttctgatggtgcaccgcgccttcccacgaatctattatccgccatctgtagcaactctgctgactcatttatgctgctatcaagactgcttgccgcaaggagcaccaacctctcccacgatatctaacctggtaatgaagccgtttgacgaccacatgggcacttggtgcaaggagcgtggtatcatatacactcggtattgcgacgacatgacgttttccggtgacttcgatgcggagccgcttattcgtaaggtacgctcattcttattatcgatgggttttgagctcaatgagcgaaagacacagatactgtgcggtggcaagcgccagagcgttacaggcatcgttgttaacgagaagcctcaggtatcacgtgtctatagagataagttgcgacaggagctttattactgccagaagcacggagtagcatcgcatctgctttggttgaacgatcgacagtacctgccgcccgagccagaacaaatcgagcgttaccttcggtcgcttattggtcggattaattatgttcttcaagtggacccactgaatctctacttcgcagaggctcgtacgacaatcgggaatatgataaaggacatggagtcaggttga

SEQ ID NO: 315 - DNA, 1008 bp, synthetic construct
  source 1..1008: mol_type = other DNA
atggctagcgcatggagtcatcctcaattcgaaaaatccggaatggcgtcacctagtcaaacatcgaagttgcgtatgctgggccttccaatctttgatgacctggagagtttcgcccaagtaacgcggttatccaagaagttcttgtatcttcactcttcattttcagaccagcactacaagaagtatttcatacccaagaaatcgggcggtcaacgcgaaatttcacagccgtcaaaggcccacaaggccatacaagggtggattttgcgcaatatcttagatttattacaagtttcacaagcgtcgaaaggtttcgctaagaagcagaccactgccgataacgcaatcccccatataggggctaatgcgatcttatctctcgaccttgaagatttctttccgtctatcacagcaaataaggtgtactctattttccattcattggggtacagcaagccaataagtataatgctgacttcaatctgtacctgcggtggtaagttaccgcaaggctcgccatgttcgccgaagcttgctaaccttgtctgcatcagattagacaatcgcgttcaaggttacgtgggcgcgagaggggttacgtatacccgttacgctgacgacctgacattttctgctgcacatccgggaaagttaatgcatatctttaactttatccggcgcattatcaccgaagagggattctcattgaatgaatcaaagacgagacttgccggaactagacttagaaagaaggtcaccggtcttgtagttacagaaggagcggttggggtgggccgtattaagtaccgagagttgcgatccaaagttttcaaccttactaaaacacaggacatcttctacgaccaaaaggagattaatgaaatctatggttggttaggttatctgaagtccatcgacagtaagcgttacgaaaagcttgtgagtcaaatcgagacacttaagaagaaccacaaggagactagtttagattatctgttagtctga

SEQ ID NO: 316 - DNA, 945 bp, synthetic construct
  source 1..945: mol_type = other DNA
atggctagcgcatggagtcatcctcaattcgaaaaatccggaatgaattactctaatatctcgacactggtcaagcaaatgttgttgaagatacatgatgatatttacaagaagatcaaccaaaactacatcgacgtcttcctgtgcggcggcgtttcctcgagccgtaacatcagtgtacgcgacattattcgtaaggaactcgaaaagaagaagggaatccggatattgtacccggaagagcttttcatggagatccttaacaaggacaaggagtccgaccttttgtccttggagaagttcctggccgacaactgcgacatcatatgcataatttgtgagtcggccgggagtttagtagaattaggtgcattcacgaataatgacgctacggttgggaaggtaattgcagttatcgaggagaagcgcaagaaggataagtccttcattatgctcggtcccatcaaggtgattgaacgtataaacaatcgtaatgttttcttctataacaagaacaagttggaagacctcagcaacgaactttctagagagatcaaacttcgtcgatttcgcggcgtgataaagatcgaaaccgagcaaaacaagccattaaacactattttaggtctgtactacattttgccacttatgttatacttctttaagtcgctggagtacatcgagctgaccaactatctgaagtacttatttaagatcaagggttatgacgacagtgacttcgagtggctgttccggtcgtccttgaaattactgtacaaggaccggtatatttacaagactacagtcaaggagaagacattctatagtcttactcagaaggggtacaataacatctacaacgtcctgtacagtatcgacattaacaacagaacgctgctgtatgattccatacgtctgggcataatcaaaagcgcatactactga

SEQ ID NO: 317 - DNA, 1002 bp, synthetic construct
  source 1..1002: mol_type = other DNA
atggctagcgcatggagtcatcctcaattcgaaaaatccggaatggctaagacagaaataatcaaactgaacatgctgggcttacctgttattcaaagtctggacgacttctcggcggtaacgcatatttctaagtacactatttatcaacttagttaccactctgagaagtactacaagacatacgatatcactaagaagtcaggcggaaagcgtaccatttgtcagccttcacggaaattaaagggactgcaatcttggattcttgtcacaatattgaacaagatccaagtctcccaaagttgcaagggtttccgcaaagactccagtacactcgataacgcaataccgcatataggagctaatactattctgaaccttgatttaaaggatttcttcccgactgtgatatcgaagcaggtgtttaacatctttaagacgatcggctacaataatctgataagcacggttttcactaacatttgtacctttgaaggtaaattaccacaaggtagcccgtcaagccctatgttggcgaacttgtcagcgtggacacttgacttgcgtatacagggttatgttggtaagcggggaataaactatacccgctatgccgacgatttgtcattctctgggttaaatccgagcaaagtagtaaagatcatcccgatgatcaaaactatcatcgatagcgaaaattttgtcgttaatcacaagaagacacgtgttgcttcctcagcgcgtgcgaagacggtaaccggtttggttataaacgaggacagcgttggcatcggaaagcaaaagtataaggatttacgcgccaagattcaccacctgacgttgccgaaggagcaaaagaacgaggaactgctgtaccatgtgtcaggctggattagttatcttaacagcgtcgataagctccgttttaacaaagcaaagaagtacatctccgaattaactaagaagcatccgaagacattaatcgctagactggataaatga

SEQ ID NO: 318 - DNA, 1011 bp, synthetic construct
  source 1..1011: mol_type = other DNA
atggctagcgcatggagtcatcctcaattcgaaaaatccggaatggccaagaacgaaaacattcgcctgaatatgctgggtttgcctattatacaaaccatcgacgatttcagtcaaataacccatctgagcaaatatacgttataccagctgagtgcgcgttcagacttccactacaagaagttcccgagtaagaagaagagtggcggcacacggaccatttgccaaccgtcaaagaatttgaagggtctgcaggcgtggatcctggtcaatatactgaacaaattaaaggtgtcggactcctgcaagggttttgagaaggggagctcgacagcagacaatgcgcgtccgcacataaacgccaactgcatgcttaccatagacctgtcagacttcttcgggaccgttaccgacatacaggtctacaacgtcttcaagtctattggatacaacaagttgatatctacaatgttgacaaacatttgcacatgcgacaacagcttgccgcaaggctctccatgctcacccaaactggccaatttaattacctggaagttggataaacgtattcaaggcttcgttggaaagcgcggaataacgtacacacgttatgctgacgacctgtcattttccggtttacatccggcaaatacagtgcagatcctgccggtagttaaatcgataattgaggatgagggttttcttattaaccctaagaagactcgcgtagccggtgcaaaccgtgcgaaaagaattacgggattagttatctcgaacaatcgctttggggttggtacgaagaaatacaaaatggtccgttcgaaaatttaccacctcactaagctttctgagcagaagaacacaattttgttgaacgaagtaaccggttggatatcttatttaaactcagtggacaagcctcgattccggaaggcgttaaaatatgtcgaagaactgaagaagaagcatccaaagaccctggttgacaaaattaccggctataataactga

SEQ ID NO: 319 - DNA, 1110 bp, synthetic construct
  source 1..1110: mol_type = other DNA
atggctagcgcatggagtcatcctcaattcgaaaaatccggaatgaataacatcaagactaagactaattactttctcctgaataccctgggcttacctattatcgattctttagacagcctttctgacacgctcgcaatctctaagaacatgatctatcttcttagtaagtgcaattacaattattacgtgaagacacacatcccgaagaaggacggcaccaagagagaaattctgattccaaattattcaatgaaaatgacgcagcgatggattttgcaaaacatactctacaagatccgtgtttctgacaacgcaaagggatacaagaaaggaataaaggctccgctggttgagaacgccatgatgcatcatgaacagttgtactgtttaatcttagacgtagagaatttctttccgtcaataggggttaagcggatttgcaacctgtttgagagagtaggatacaattcgttaatctcctacatattagcacgaatctgtacctataaggattacttacctcaaggagcagttactagcccttatcttgccaatttggtttgcttcaaactcgaccggcgcattgacgcgtactgttgcaagcgagaaatcagttacacacgttactgcgatgatctgatattcagctcagacaaccttgacagtctcaagaaggcatacaagatgtttgaagtcatcctttgtaacgagggctttaagctgaatcgacgaaagacgcggtttctgacccctaatacactgaagcaaatcttggggattacgatcaacgacgaactgattaaggccccgaagataatgaagcggaaggtgaaggctctcatcttcaagtctatagtcaacaaggactaccggaagaatgacgttattcgcgggtatatcgcttatatcaagtctattgaaaacaactaccagaacaagattgaaaagtacgtgaaacggctccataataaggattttattcgcggcgacctcgaagtggttaaggcgtacaacgaaaataaactttattcaaattttcccgatttagcctttagcaaggcagcggccttattcttggaaaaccccgagttagaagagttaatgtga

SEQ ID NO: 320 - DNA, 1059 bp, synthetic construct
  source 1..1059: mol_type = other DNA
atggctagcgcatggagtcatcctcaattcgaaaaatccggaatgctttacctggagaagttagtagaatccatggaagggaaatatgagactaagtacatttctttgtgcgctgcttacagcgaacaactgatatcaaagggtatgccagtcatattcgacggccaacacctggcaaagttgctcggtataaatttcagcatcctgtcttattacgtgtactccacaaacaaattctatcaagagttcgagattgacaagaagtccggcggtagtcggaagatcgaggctccaagcagaaatttgaagaagatacagcgttggattttagacaatattttgaacaagttcgagcttaacgaaaacacctacgggttcagaaagggttataatatagtagacaacgcgaagaaccacacgaacaagtttctggtatataacattgatataaaggatttcttcccgtctataacgcgcgaggacgtattctacatcttctataacaagggttacacatacgaggtttcgtatattttctctaaacttttgacatacaagaatcatttaccgcacggcgccccaacttccccttacatcgcaaatttgcgctgtgaaaagatggattatagccttaatgtatacacgaagcgtatcaacgcggactattcccggtacgcagacgacataacaatatcaaccaacaacgctcacgactttatagacaacatcaaaatcataaagaaaatcatcacgaacaatggcttcgtgctgaatgagaagaaggagcgtatacagtactacaaaagcatgcaggaagtgactggattgatcgttaataacggtgtaaaagtacggcgtcgcttcaagaaggacctggaaaaggagatttattactgtcttaagtatggtgttagctcgcatctgacacgtacagaaaagaatcatttgtctttctacaaggagtacctttacggaaaggtcaacttcattaagatggtcgagcccgagttagcggaattctatttaaagcaactttctgagattaactggtactcctga

SEQ ID NO: 321 - DNA, 1458 bp, synthetic construct
  source 1..1458: mol_type = other DNA
atggctagcgcatggagtcatcctcaattcgaaaaatccggaatggctacagatacattggcttgggcagacgtggacgcagcgggcggaattcgtgcgtgggtggacgccgaggtcgcacgtcagggcttagctgacccaggagctacacaatcgacatcagaggccaagtctcggggagtgggaactcctaccgcgtctccggcgggccgtggatcaagtccggttgagaagatgtccgacgcggagctgaagttatacaaagcacgccgcgatgaggagcggcgtgtacgccgcgagttgtaccggcgggcttggcaagcctaccgtagatcgcatatcgtacacttgggcccaggggtattttggcacgacacggccgacgttgaccgattcgacgcagacgatccggaacgtaagcgccaagataacgcactccctgcactggcagacgttgaggcactggccaaggctttgggtttgacgatagcacggttgcgttggcttgcgtatcatagagatgtcgacactgggacgcattatcaccgctggttggtaccaaagagagacggaactccccgcttaattagcgcgcccaaacccgagttgaaggccgctcaacgatggattatgcgtgaagtaactgagcacctgcccatgcacggggcggcacatggctttatccctggaagaagcatagcttccaatgcagttgttcacgccggtgcgcgggtagtagtgaagcttgatattcgtggattttacccgaccgtaacaatgcgccgtgtgaagggtctgctgcgccgcgcaggactcggtgaacaggttgccactgtgatggctctgttggcaaccgagtcaccgcgagagaaggttgagacacacgggaagacgcactacgttgccctgggcccacgatcgctcccgcaaggcgcgccaacttctccgagtataacaaacgccttatgcctgcggctggactgtcggttgagtgggctggccagaaagctggactgccggtacacacgctatgctgacgatctcaccttttcttggcacggagcggcacgtgcacaaataggtagtctgctgcgtgctgtgggcaagatcgtacgggctgaaggcttcgaggtgcatatgaagaagacgagagtgatgcgcgcgggcgctcgtcaaaaggtaacaggattaatagtgaaccaagcacccccagatcgaccagccgcgcgtgtccctcgtgacacgcaacgtaaactgagagcagccatacgcaaccgcgaattgggccggccgggaaaaggcgagactttagaccaacttaagggcatggcagcattcgtcatgatgaccgaccctgcccggggacgtgcattcatggagagaattgagcgtctgattgcggccggaacacaaggtgccgatggtgcacccgggacgccggaacgtggctcaccctga

SEQ ID NO: 322 - DNA, 1578 bp, synthetic construct
  source 1..1578: mol_type = other DNA
atggctagcgcatggagtcatcctcaattcgaaaaatccggaatgtcagaccaaacgtcgacgacggaacccgccccatcagcagacacaccttcggcactggcatcagctgatgggcagccatcaggagctgaggcgtgggccgagatcgatgaagctggtggcatccgggcctgggtacaggctgagttgacgcgccgtggtttaatcgacgacgctgatacaacgagcatgtcagacaaggagagaaagcgttaccgggcgcgtcgagatgaggagcgccgggttcgtcgtctgttggaagctcgcgcatgggctgcataccgtcaagcgcatctggtgcacgtaggtcttggtgttttctggcatgacaccgccgattacgatcgatatgatattgctgaacccgaagtccgtcgccaagataacgatctgcccgcactggccgatgtccaagcgctggcgcgcgcgttggcactccctatcccgcgtctgagatggctcgtgtaccacagagaagtggactcaggcacacattaccaccgttggacagtccccaaacgcagtggcggtgaacgactgataagcgcgcctaagccaacgcttaaaagagcacaaacttggatagcgcgcaacatcactgagcacctgccggtccacggtgcagcgcatggtttcttacctggacgtagcaccgccactaacgccgccgcacacgctggtgcagcagttgttgttaagcttgacctgcgtgatttctatccttctataaccttaccccgggttaagggcgtcttccgcaaggccgggtacggagagcaagtcgctacagcgctggcacttttatgcaccgagtcgccgcgtgaagagatggtcgtgcacggtcggcgttatcacgtggcagttgggtcccggtcccttccgcaaggtgcgcctactagcccctctatcacgaacgctcttagcctgaaacttgactgcagactcgacgggttagcccgcaagttaggattccgttacacacggtacgccgacgacctcaccttctcctggcaccaagatgaggacgcgcctgtggggcggttaattcgggcagtcgaacggattacagcggaagagggctttgctgttcacgagaagaaaacacggataatgagagccggccgacggcaaaaggttacaggactcgttgttaatagacttccccgacggccttccgggcaagctagcgatgagtccagaggacaaccgtctgaggagccgttgggtcatggcgcatctggtcaagagcctggagttggagctccgcgggcccgtgtgccacgtaagttagttcggcacttgagagctgctatacacaaccgggcgcaagggaagcctgggcaaggcgagactcttgctcaacttcgtggttgggccgcatacgtgcacatgacagatcccgcccgtggtcgcgcgttcttagaccaattggaccggttagcctctgccggggtgggtgacgagacaggcgcaggtgctggtgacgaggctagcgccggcacaagtgatctgccagcgaccggagacaagagttga

SEQ ID NO: 323 - DNA, 1944 bp, synthetic construct
  source 1..1944: mol_type = other DNA
atggctagcgcatggagtcatcctcaattcgaaaaatccggaatgtcagatcaagctcgtcgcgcggctatacaagcacggattgcacagtcatctcgtgacgacgtcatccttgatgaaatgatacgtttgggcttttgggatgctggtggtgacccacacgctgcggagcttactgaaataatggcgcgatctaaggaaatccgttctgaattgagtcaactcaatagccaaaatgcccgttacttagaccctgaggcagccttaaaggcgatgcatgcggagcgcaaggcagcagctctcgctcgtcggaaggagacaaaactggcccgggcgcgagcgcgccaggcgcgggcagaggcgtgggctcaaagatcccgcgacgcggtctggcatctgggtcctggtgtgtccgctgcacttgaacagggcgagggcaagtccgcgccgcggtcgttagcgccggggcttccagctcttgccacaccagcagcggtagcgagcgctatgggtgttagcactggcgaactccgattcctggcgtacgcccgcccaatgtccagagtctctcattataagcgtttcgaaataactaagaaaagcggtggaaaacgtgtgatatcagccccaatgccgcggcttaagtatgcacaatactggcttctggacgctgtcttatccaagttacctcttcacccggctgcacacggtttcgtgccgggaagatccatacttacaaatgcccggccccatgtaggcagagatgttgtggcgaatatggatctccgggatttcttcccaacgctcgacgatcggcgtgtcaaggggcttttcgagtcgttgggctacggcgaggacgtcgcacaagttctcgctttaatcgcgaccgagcctgtaactgacgaaatagagattgatggccgggttacacacttggcccggtccccaagaagacgcttaccacaaggcgccccatgttcccctgctataaccaacctgatctgtcgcagattagacgctcggctggcaggcctcgcggctaagcttggcttcgcgtacacgcgttacgcggatgatttaacattcagcgcttcgggcgaagacgcaaagaaggttggagctttgctgagagcagcccaagaaatcgttcgtgcagaaggtttcgaacctcacccagacaaaacccgcgtcatgagaagaggtgcacgacaggaagtgacaggtctggtagtcaacgaccgtctgggagcaccacgtgaggccgtcagacgggcacgtgctgcacttcatcgggcggaacgtcaaggtgtggcgggattgaagtttggtagcggtcgcgatgcattggcggggctggtaggcttcgcccaatttgtagcaatgatagatccacggcaaggcgcttctcttgtagcccgtgcacgggctctgcgcagaggcgctgacgaaggggcaacgtccatgttgagtagagcgggactcgcgcgagcgggccttggggctgccgcactgagaaaggctgctgctgcaggggccccaccagaagcaatgcgctggcgcccggcggagcgaccagctccaactctcgaccccgtcttggttgaggctgaacgagctgcggcagccaaagcgcggcgagaggctgagaaggaaggatcacgccaagcgaaatccgcacgaagcggtacgtcagtaccaccagtacgtggcgctggtacaggcgcgagtggtggtggtggacccgctcgtgccgtctggggacgtactgcgaccccggagttgggtgagtcttctgccgagtgggcacgtccggcaaccccacgacgaagtttctggtcgttagcggtgaccggttggcttatactgatggcccttgcggtcttgccatttgccccctggcttacggcgttgttgggctatttagtttatcgacggttacgctga

SEQ ID NO: 324 - DNA, 1413 bp, synthetic construct
  source 1..1413: mol_type = other DNA
atgaagccgattataatcgaagacggtcggacgatagtgttagcccgtgggtacttctcgccccacagatacgggacgggtcgattcggcggcttcaatcagattcaggacgggctccttgcagaccctgagctgctgcgtcaagttgtatccaccatcatgtgcccagaagagagaacgttgattcctgagaatgacttctatcctgaatgctgggagccagagaagtatgaagcggatggtccgcttggctccatagacgctttcttcactacgttccgccgcatcgccagacacgatatgtactgttccactgttgagcaaggcgaatgggtcatggcttacggtacggaacaacttacctaccggcgaatgaaccggccactcgacgacaagcatttccgtttaaagtcaatccgattaccggacgagagcgaccgggcgttggtcaagaagtgctttgaatttcgcgtggcacccgccatcacgcattgcttaatcgtgggtcgggcattcatgcgtgaggacaaaccgatgtataagcacttcaagaaacgcactaccagcaaagtgcgtgatatttgggcaccggagcccgaggtaaaggcagccttacgtcatttattgcacccgctgaattcggcgtacgacatgaagcggtctggttcaccgcaatacgcttacacaaaagaccgcaatatcttaatgaacgcggagccgcacgcacgcaacaagtggatgcttaacgcggatattacgggcttctttgatcactgcgactgggacctggttaagggttacatgagattcctcatgaaagacatctccgctgaagacaaagctgttcttaaagttatgttaattaacccagccacgggtggcctgtaccaaggtagtcccgtatcgggagctctgtcaaacgcgatcctcagacccgcggccaagtacatgaaagctttctttcaaaaggaaggacgtaccctgaccgtatatgccgatgacataactgtgtctcagggagcagccatcgattcaacagttcgtaagaacatcgtcggtaaaattcgtcatgccttcgagaagttcgacctgccgtttgaccttaagccgtctaaaacacgtgttagcagaaacaacggtcggaaagtcaccggtattagaatcaaccatcttgatcaatgcacgatcccactgccgaagtatagattgttgcgttcgatgctgcaccgtatgagttcgggtggtgacgtgaccatggcaaaatcccaacttaaggggtatcttgagttcgcgcgattcaatgatcgttccggtaagattgaccgtttgatcgacaagtaccgcgacgtcttggtggacaagggcatgataagaccaattctggacccgcagccagtagagatccctgaggag

SEQ ID NO: 325 - DNA, 1623 bp, synthetic construct
  source 1..1623: mol_type = other DNA
atggatgacaagaacaagttgtacctgattaatgatggaaagacgatcgtaacccgtttcggtgcaatcactccattccatcaaagcaagaagtacgaggatacgttgaagatcccggaaaagtttctggaagacccggaaagtctccggcaattgatcggattcaagctcttcgaagaccgcacgaagatcataaataagaacgatttctacatgcgggacccacaagtatataagaaggggaaacaaaccacattaattagcttcttacaggcagcacataaggtgatgcgccttcactacgagaattatagagtcgaaattttcagtaagtacgtagttgtgttaaattgtcccactattaagtttaccggtacacaagtaaaagagacgtgccatatcgactcaaagacagcgaacggcgagcgaaagcctctgctgatcagtgcctgctataaggtcgaggacgatgacgaacgcacgaagatcttcgacctgctgacgcttaagtacgcccccgcgatcatagacgtgtatattactacactgcgtttggaagcggccgggacgaagctgtaccagtactataaggttccaactagcactaaggtccgggagatatgggcaccagaagatagtctgaaagattctatgcgacatctcttgttgccgctcacgtcggcgtacgacatgaagaagaagaacagtacgcaatacgcttatatcaaggagcggtcgatcgtgaacaacgccgaggtgcataaggacaacaaatatatcgcgaaattcgacattaaaggtttcttcgacttttgtaactgggatctttcttggaaatacctcaagttcctcttcccgaaggataaatacggcaagaaggccgagctgtacgacgacgtaaagaacacgttaaaacgcgtgattattaatgaacaaactggtggactgttccaagggaaccctgtctcgggtgttatttctaatgctatacttcgtccattctctaactacatactgaacatcctggaaaagcaagcagatgtcaagaatggggtgttcccgtctatcaatgagaagaatgcggagactgagagtatcgacccagagggtaacattacaaccaagttcgacgggaaggaatacaagtccttcagcaaatatacggatccgagcaacgaagacttacgttacgccgtatcagtttatgcggatgatataacggtgtcgtctaattaccctatagactggaacgaggcaaagcgcatcagcggtatattgcgatactcgttcgagcacctggagttgcctttcaagctgaacctgaagaagacttctattgcccgtaataatggtcgtaagatcactggcgtacggatcaaccataacgatgttatggttgtatcgcgggtgaagtacatgcttctcaagtcaatgtgtcaccggatcaaacacggtaagaaaatctcaatgccgaagaatgtcttccaaggcaacttagcatacgcccgtttcgtggatcacagtggaaagattgagactctcatagctaaataccacgctaacttggttgaatttggaatcaacttgaagttacccggagagcttgcggactcgtatgtcgag

SEQ ID NO: 326 - DNA, 972 bp, synthetic construct
  source 1..972: mol_type = other DNA
atgttactggaaaagctgcaaatacaatctaaccagtctctcgaacgcttagagcgattcgcaacgtcagcgtccaagcggtacaaggttttccaaatcccgaagcgttccggtggcttccgtataatagaacagccgtcaaaggagatcaaggcgatccagagatggttgatagaggcgttattcgacgaatttcccatccaccattcagcaaccgcatatatacggggcaagaatatacgatcgaacgccgaggtccacgcggagagtaacttcacattgaagctggactttgagaacttctttccttctttcacggagcgccacttaatcaagtttctgcgaaactacccattaatagaaaagaaacagataaacgacagagatataaacttcatcagccgcatctgtctgcgtaacggccgcctgacaattggtgcgccaagcagccccacaatcactaacgccatgatgtatcaattcgacactcttatgtcagcacgttgcgctgaggacaacttctcatatacgcgttacgccgacgacgtgtttgtttcttctcgttcgtacattaacgtgggtgagattatacttttcgtagagaatttactttcgaagtacgagtatgcgtcgctgcgcctgaacaaagacaagaccgcaattctctcacgtaagggacgtcgttccataacgggctgtgtgattaccccgcagcgtggtattagcataggtcgaaagttaaagaagtccataaagcacaagatctacgagagcattaacggtcgattgtcatccttagaggcaactaagttaatgggatatctcggatttcttaaggacattgagccaaattacttcgagtctctgaagaagaagtacggcgctgacgccattaaaacaatcacgtcagggaactacgatgagattaagttggttccattaatattagacgacttagacgatacaccattc

SEQ ID NO: 327 - DNA, 942 bp, synthetic construct
  source 1..942: mol_type = other DNA
atggtgtccgatattcttgacaagatttcaaaggatctgctgtgcagtagagatgtgctgttgagaatgtaccaccgggcaccgcacgcctacaagttctacgatatccccaagaagaatggtggtgttagaagaattgctcagccagcgcgagaggttaagaaggtacaacgctgggtcgtagataatatattgtctagcgtaaaaccatcagcattttcaacagcttacctggaaggtagttctattaagaagaacgcatgcatgcacttacataacgcctacatcgccaagttcgacttcaagaacttcttctattccatcaaattctcggatgtgaagagaaccctggaagttaagtacggcatggaagaggggcaatcaaagttcatagcccgtttatgcagtgtgtcaatcgaggggaatctgtgcttatctatcggcgcgccctcatcgccaagcctttcaaatatcgtgatgtacgatttcgacgagtacttagccggaagatgcctgtcgctggacattgtgtacacacgttacgccgacgacatgactttcagctccaatgagaaaggtgtttgcttccaaattgaggggctcattgttgacgccctgagaaacaccgagtcgcccgaattagcgttaaaccacaagaagacaaacttcatctccaagaagtaccggcggacggtgaccggcttgactctgaccaacgataagaagtcgagaatttcgttgggccgcgaccgtaagcgtctgatcaaggctttagtccaccgtagcatcataaacaagcttgataaggaagagctggaaaagctgcaaggactgttaggattcgcttaccataacgagttctctttctacaattccttgtgcgacaagtacgggttcggggttgttagtaaccttatgaagcagaagtcaccgacgataact

SEQ ID NO: 328 - DNA, 930 bp, synthetic construct
  source 1..930: mol_type = other DNA
atggagcttataaataagcttgcaacaaagctcaataaaagcgaatctgaggttatacggtttctcgccagtgcgcctttgaagtataaagtatacacaatacccaagcgtacgagtggacaccgagtcatagcccaaccatcccgggaattaaaggaataccaacgcgccttcatctcactttacagattaaacatccacgatgctgcaatggcctaccgtgagcgcctgagcataaaagataacgccaaatttcactgcaagaaccgttacctgctgaagatagacctggaatcattcttcaactccattaccagtgagttattctggaccatttggcaacagcattatgagatgccgaataacgacgaaaaggtgctgatggagagactgttattctggagtccgggcaagagttctacaggcaaactggtattgtctattggagcaccatcttcccctctgttgtctaacttctttatgtaccaattcgatgagttagttacacgccattgcgagaagttggagattaagtatacacgctatgcggacgacctcacgtttagcaccaatgcgaagaatgtactgttcgacatgccccgatacatttccgacaccctgacgacgttatttggctccgcattaattattaaccgccggaagacggctttcagcagtagagcgcataaccggcacgtgacgggtataaccatagacaacgaatccgaccttagtttagggcgcgagaagaagcgttacatcaaacatctcgtccaccagtaccgcctgaacaagctcgataaagagaacgttttccacttaaagggtttactggccttcgccaaacatatcgaacccaagtttataacatcattagagactaaatactctgctgaggtgatcacgcaaatcttcgaggaacaacatggt

SEQ ID NO: 329 - DNA, 957 bp, synthetic construct
  source 1..957: mol_type = other DNA
atgtggcgatattgtacagacgaggaagcaataagaagctttcaccttaccgacggtttgcagtgcaaggaaggaaaagagatacaaacgttattcgctgttagcaatcacgccgaagttcactaccacactgcatacattccgaagaagaagggtggccgccgcaagcttctcgtccctgacgcccttcttggacgaattcaaaagaatatcctgcaaaacgtgctcgccgaacgaaaagtgagcccatatgccaaggcctacattaaggggatgggtatcgtagaaaacgcgcttcctcatagtcacgcggagatcctgttaaagctggacattgaggacttcttcgaaaacataacgtatctcatggtataccagaaggcattcccagaaaagtattttccaccagccatacgtaccatgctcgcacacctgtgctgttataatgattacttgccgcagggcgccgtcacatcaccgatgatatcaaacctggttatgtactctttcgacgagtacataggtaagtggtgtggtgagcgcaagatcgcttatacgcggtactcggacgacatgaccttttcgggcgacttcgaggttaaggaagtgaagcataaagttcgtagcttcttggggaaaatgggcttccttttgaatgaagagaagacccgtgtgttaaaacaataccagcgacaaatcgtcaccggtattgtggtcaacgaaggcactaatatctcaaagagttacaaaagatcgatccgtcaagagatctactactgtgagaaatacggagccaaaagtcacctgcagcggcgaaacctttctgagaaggaagaggtcccttacctgaaacagttgttaggaaaggttaattatgttctgcagataaatccggacgacaagaatttccaagaagctaagaagaagatcaaggagatgctcttgaaaattaaagga

SEQ ID NO: 330 - DNA, 999 bp, synthetic construct
  source 1..999: mol_type = other DNA
atgataagtacgggactctggaagtactttaccaaggaacaccataaggaattcgtcctgagcctcggtctgctcaacgataccggatggccaattgagaagcagttacgatgtctgtacactgtttctaaccacactgaacgtcattacaccagattaacagttcctaaacgagatggcactattcgggagcttctctcgcctgatccactgttgaagaaaatccagcgtaacattttgcacaatgttctggaagagttacctgtgtccccgcacgccactgcgtaccgtcgaggtgcaggcatactcggcaacgctttcccacaccaaggccgcaagcaagtcgtgaagttggacattcgcgacttttacgggtccataacttttctgatggtgcaccgcgccttcccacgaatctattatccgccatctgtagcaactctgctgactcatttatgctgctatcaagactgcttgccgcaaggagcaccaacctctcccacgatatctaacctggtaatgaagccgtttgacgaccacatgggcacttggtgcaaggagcgtggtatcatatacactcggtattgcgacgacatgacgttttccggtgacttcgatgcggagccgcttattcgtaaggtacgctcattcttattatcgatgggttttgagctcaatgagcgaaagacacagatactgtgcggtggcaagcgccagagcgttacaggcatcgttgttaacgagaagcctcaggtatcacgtgtctatagagataagttgcgacaggagctttattactgccagaagcacggagtagcatcgcatctgctttggttgaacgatcgacagtacctgccgcccgagccagaacaaatcgagcgttaccttcggtcgcttattggtcggattaattatgttcttcaagtggacccactgaatctctacttcgcagaggctcgtacgacaatcgggaatatgataaaggacatggagtcaggt

SEQ ID NO: 331 - DNA, 963 bp, synthetic construct
  source 1..963: mol_type = other DNA
atggcgtcacctagtcaaacatcgaagttgcgtatgctgggccttccaatctttgatgacctggagagtttcgcccaagtaacgcggttatccaagaagttcttgtatcttcactcttcattttcagaccagcactacaagaagtatttcatacccaagaaatcgggcggtcaacgcgaaatttcacagccgtcaaaggcccacaaggccatacaagggtggattttgcgcaatatcttagatttattacaagtttcacaagcgtcgaaaggtttcgctaagaagcagaccactgccgataacgcaatcccccatataggggctaatgcgatcttatctctcgaccttgaagatttctttccgtctatcacagcaaataaggtgtactctattttccattcattggggtacagcaagccaataagtataatgctgacttcaatctgtacctgcggtggtaagttaccgcaaggctcgccatgttcgccgaagcttgctaaccttgtctgcatcagattagacaatcgcgttcaaggttacgtgggcgcgagaggggttacgtatacccgttacgctgacgacctgacattttctgctgcacatccgggaaagttaatgcatatctttaactttatccggcgcattatcaccgaagagggattctcattgaatgaatcaaagacgagacttgccggaactagacttagaaagaaggtcaccggtcttgtagttacagaaggagcggttggggtgggccgtattaagtaccgagagttgcgatccaaagttttcaaccttactaaaacacaggacatcttctacgaccaaaaggagattaatgaaatctatggttggttaggttatctgaagtccatcgacagtaagcgttacgaaaagcttgtgagtcaaatcgagacacttaagaagaaccacaaggagactagtttagattatctgttagtc

SEQ ID NO: 332 - DNA, 900 bp, synthetic construct
  source 1..900: mol_type = other DNA
atgaattactctaatatctcgacactggtcaagcaaatgttgttgaagatacatgatgatatttacaagaagatcaaccaaaactacatcgacgtcttcctgtgcggcggcgtttcctcgagccgtaacatcagtgtacgcgacattattcgtaaggaactcgaaaagaagaagggaatccggatattgtacccggaagagcttttcatggagatccttaacaaggacaaggagtccgaccttttgtccttggagaagttcctggccgacaactgcgacatcatatgcataatttgtgagtcggccgggagtttagtagaattaggtgcattcacgaataatgacgctacggttgggaaggtaattgcagttatcgaggagaagcgcaagaaggataagtccttcattatgctcggtcccatcaaggtgattgaacgtataaacaatcgtaatgttttcttctataacaagaacaagttggaagacctcagcaacgaactttctagagagatcaaacttcgtcgatttcgcggcgtgataaagatcgaaaccgagcaaaacaagccattaaacactattttaggtctgtactacattttgccacttatgttatacttctttaagtcgctggagtacatcgagctgaccaactatctgaagtacttatttaagatcaagggttatgacgacagtgacttcgagtggctgttccggtcgtccttgaaattactgtacaaggaccggtatatttacaagactacagtcaaggagaagacattctatagtcttactcagaaggggtacaataacatctacaacgtcctgtacagtatcgacattaacaacagaacgctgctgtatgattccatacgtctgggcataatcaaaagcgcatactac

SEQ ID NO: 333 - DNA, 957 bp, synthetic construct
  source 1..957: mol_type = other DNA
atggctaagacagaaataatcaaactgaacatgctgggcttacctgttattcaaagtctggacgacttctcggcggtaacgcatatttctaagtacactatttatcaacttagttaccactctgagaagtactacaagacatacgatatcactaagaagtcaggcggaaagcgtaccatttgtcagccttcacggaaattaaagggactgcaatcttggattcttgtcacaatattgaacaagatccaagtctcccaaagttgcaagggtttccgcaaagactccagtacactcgataacgcaataccgcatataggagctaatactattctgaaccttgatttaaaggatttcttcccgactgtgatatcgaagcaggtgtttaacatctttaagacgatcggctacaataatctgataagcacggttttcactaacatttgtacctttgaaggtaaattaccacaaggtagcccgtcaagccctatgttggcgaacttgtcagcgtggacacttgacttgcgtatacagggttatgttggtaagcggggaataaactatacccgctatgccgacgatttgtcattctctgggttaaatccgagcaaagtagtaaagatcatcccgatgatcaaaactatcatcgatagcgaaaattttgtcgttaatcacaagaagacacgtgttgcttcctcagcgcgtgcgaagacggtaaccggtttggttataaacgaggacagcgttggcatcggaaagcaaaagtataaggatttacgcgccaagattcaccacctgacgttgccgaaggagcaaaagaacgaggaactgctgtaccatgtgtcaggctggattagttatcttaacagcgtcgataagctccgttttaacaaagcaaagaagtacatctccgaattaactaagaagcatccgaagacattaatcgctagactggataaa

SEQ ID NO: 334 - DNA, 966 bp, synthetic construct
  source 1..966: mol_type = other DNA
atggccaagaacgaaaacattcgcctgaatatgctgggtttgcctattatacaaaccatcgacgatttcagtcaaataacccatctgagcaaatatacgttataccagctgagtgcgcgttcagacttccactacaagaagttcccgagtaagaagaagagtggcggcacacggaccatttgccaaccgtcaaagaatttgaagggtctgcaggcgtggatcctggtcaatatactgaacaaattaaaggtgtcggactcctgcaagggttttgagaaggggagctcgacagcagacaatgcgcgtccgcacataaacgccaactgcatgcttaccatagacctgtcagacttcttcgggaccgttaccgacatacaggtctacaacgtcttcaagtctattggatacaacaagttgatatctacaatgttgacaaacatttgcacatgcgacaacagcttgccgcaaggctctccatgctcacccaaactggccaatttaattacctggaagttggataaacgtattcaaggcttcgttggaaagcgcggaataacgtacacacgttatgctgacgacctgtcattttccggtttacatccggcaaatacagtgcagatcctgccggtagttaaatcgataattgaggatgagggttttcttattaaccctaagaagactcgcgtagccggtgcaaaccgtgcgaaaagaattacgggattagttatctcgaacaatcgctttggggttggtacgaagaaatacaaaatggtccgttcgaaaatttaccacctcactaagctttctgagcagaagaacacaattttgttgaacgaagtaaccggttggatatcttatttaaactcagtggacaagcctcgattccggaaggcgttaaaatatgtcgaagaactgaagaagaagcatccaaagaccctggttgacaaaattaccggctataataac

SEQ ID NO: 335 - DNA, 1065 bp, synthetic construct
  source 1..1065: mol_type = other DNA
atgaataacatcaagactaagactaattactttctcctgaataccctgggcttacctattatcgattctttagacagcctttctgacacgctcgcaatctctaagaacatgatctatcttcttagtaagtgcaattacaattattacgtgaagacacacatcccgaagaaggacggcaccaagagagaaattctgattccaaattattcaatgaaaatgacgcagcgatggattttgcaaaacatactctacaagatccgtgtttctgacaacgcaaagggatacaagaaaggaataaaggctccgctggttgagaacgccatgatgcatcatgaacagttgtactgtttaatcttagacgtagagaatttctttccgtcaataggggttaagcggatttgcaacctgtttgagagagtaggatacaattcgttaatctcctacatattagcacgaatctgtacctataaggattacttacctcaaggagcagttactagcccttatcttgccaatttggtttgcttcaaactcgaccggcgcattgacgcgtactgttgcaagcgagaaatcagttacacacgttactgcgatgatctgatattcagctcagacaaccttgacagtctcaagaaggcatacaagatgtttgaagtcatcctttgtaacgagggctttaagctgaatcgacgaaagacgcggtttctgacccctaatacactgaagcaaatcttggggattacgatcaacgacgaactgattaaggccccgaagataatgaagcggaaggtgaaggctctcatcttcaagtctatagtcaacaaggactaccggaagaatgacgttattcgcgggtatatcgcttatatcaagtctattgaaaacaactaccagaacaagattgaaaagtacgtgaaacggctccataataaggattttattcgcggcgacctcgaagtggttaaggcgtacaacgaaaataaactttattcaaattttcccgatttagcctttagcaaggcagcggccttattcttggaaaaccccgagttagaagagttaatg

SEQ ID NO: 336 - DNA, 1014 bp, synthetic construct
  source 1..1014: mol_type = other DNA
atgctttacctggagaagttagtagaatccatggaagggaaatatgagactaagtacatttctttgtgcgctgcttacagcgaacaactgatatcaaagggtatgccagtcatattcgacggccaacacctggcaaagttgctcggtataaatttcagcatcctgtcttattacgtgtactccacaaacaaattctatcaagagttcgagattgacaagaagtccggcggtagtcggaagatcgaggctccaagcagaaatttgaagaagatacagcgttggattttagacaatattttgaacaagttcgagcttaacgaaaacacctacgggttcagaaagggttataatatagtagacaacgcgaagaaccacacgaacaagtttctggtatataacattgatataaaggatttcttcccgtctataacgcgcgaggacgtattctacatcttctataacaagggttacacatacgaggtttcgtatattttctctaaacttttgacatacaagaatcatttaccgcacggcgccccaacttccccttacatcgcaaatttgcgctgtgaaaagatggattatagccttaatgtatacacgaagcgtatcaacgcggactattcccggtacgcagacgacataacaatatcaaccaacaacgctcacgactttatagacaacatcaaaatcataaagaaaatcatcacgaacaatggcttcgtgctgaatgagaagaaggagcgtatacagtactacaaaagcatgcaggaagtgactggattgatcgttaataacggtgtaaaagtacggcgtcgcttcaagaaggacctggaaaaggagatttattactgtcttaagtatggtgttagctcgcatctgacacgtacagaaaagaatcatttgtctttctacaaggagtacctttacggaaaggtcaacttcattaagatggtcgagcccgagttagcggaattctatttaaagcaactttctgagattaactggtactcc

SEQ ID NO: 337 - DNA, 1413 bp, synthetic construct
  source 1..1413: mol_type = other DNA
atggctacagatacattggcttgggcagacgtggacgcagcgggcggaattcgtgcgtgggtggacgccgaggtcgcacgtcagggcttagctgacccaggagctacacaatcgacatcagaggccaagtctcggggagtgggaactcctaccgcgtctccggcgggccgtggatcaagtccggttgagaagatgtccgacgcggagctgaagttatacaaagcacgccgcgatgaggagcggcgtgtacgccgcgagttgtaccggcgggcttggcaagcctaccgtagatcgcatatcgtacacttgggcccaggggtattttggcacgacacggccgacgttgaccgattcgacgcagacgatccggaacgtaagcgccaagataacgcactccctgcactggcagacgttgaggcactggccaaggctttgggtttgacgatagcacggttgcgttggcttgcgtatcatagagatgtcgacactgggacgcattatcaccgctggttggtaccaaagagagacggaactccccgcttaattagcgcgcccaaacccgagttgaaggccgctcaacgatggattatgcgtgaagtaactgagcacctgcccatgcacggggcggcacatggctttatccctggaagaagcatagcttccaatgcagttgttcacgccggtgcgcgggtagtagtgaagcttgatattcgtggattttacccgaccgtaacaatgcgccgtgtgaagggtctgctgcgccgcgcaggactcggtgaacaggttgccactgtgatggctctgttggcaaccgagtcaccgcgagagaaggttgagacacacgggaagacgcactacgttgccctgggcccacgatcgctcccgcaaggcgcgccaacttctccgagtataacaaacgccttatgcctgcggctggactgtcggttgagtgggctggccagaaagctggactgccggtacacacgctatgctgacgatctcaccttttcttggcacggagcggcacgtgcacaaataggtagtctgctgcgtgctgtgggcaagatcgtacgggctgaaggcttcgaggtgcatatgaagaagacgagagtgatgcgcgcgggcgctcgtcaaaaggtaacaggattaatagtgaaccaagcacccccagatcgaccagccgcgcgtgtccctcgtgacacgcaacgtaaactgagagcagccatacgcaaccgcgaattgggccggccgggaaaaggcgagactttagaccaacttaagggcatggcagcattcgtcatgatgaccgaccctgcccggggacgtgcattcatggagagaattgagcgtctgattgcggccggaacacaaggtgccgatggtgcacccgggacgccggaacgtggctcaccc

SEQ ID NO: 338 - DNA, 1533 bp, synthetic construct
  source 1..1533: mol_type = other DNA
atgtcagaccaaacgtcgacgacggaacccgccccatcagcagacacaccttcggcactggcatcagctgatgggcagccatcaggagctgaggcgtgggccgagatcgatgaagctggtggcatccgggcctgggtacaggctgagttgacgcgccgtggtttaatcgacgacgctgatacaacgagcatgtcagacaaggagagaaagcgttaccgggcgcgtcgagatgaggagcgccgggttcgtcgtctgttggaagctcgcgcatgggctgcataccgtcaagcgcatctggtgcacgtaggtcttggtgttttctggcatgacaccgccgattacgatcgatatgatattgctgaacccgaagtccgtcgccaagataacgatctgcccgcactggccgatgtccaagcgctggcgcgcgcgttggcactccctatcccgcgtctgagatggctcgtgtaccacagagaagtggactcaggcacacattaccaccgttggacagtccccaaacgcagtggcggtgaacgactgataagcgcgcctaagccaacgcttaaaagagcacaaacttggatagcgcgcaacatcactgagcacctgccggtccacggtgcagcgcatggtttcttacctggacgtagcaccgccactaacgccgccgcacacgctggtgcagcagttgttgttaagcttgacctgcgtgatttctatccttctataaccttaccccgggttaagggcgtcttccgcaaggccgggtacggagagcaagtcgctacagcgctggcacttttatgcaccgagtcgccgcgtgaagagatggtcgtgcacggtcggcgttatcacgtggcagttgggtcccggtcccttccgcaaggtgcgcctactagcccctctatcacgaacgctcttagcctgaaacttgactgcagactcgacgggttagcccgcaagttaggattccgttacacacggtacgccgacgacctcaccttctcctggcaccaagatgaggacgcgcctgtggggcggttaattcgggcagtcgaacggattacagcggaagagggctttgctgttcacgagaagaaaacacggataatgagagccggccgacggcaaaaggttacaggactcgttgttaatagacttccccgacggccttccgggcaagctagcgatgagtccagaggacaaccgtctgaggagccgttgggtcatggcgcatctggtcaagagcctggagttggagctccgcgggcccgtgtgccacgtaagttagttcggcacttgagagctgctatacacaaccgggcgcaagggaagcctgggcaaggcgagactcttgctcaacttcgtggttgggccgcatacgtgcacatgacagatcccgcccgtggtcgcgcgttcttagaccaattggaccggttagcctctgccggggtgggtgacgagacaggcgcaggtgctggtgacgaggctagcgccggcacaagtgatctgccagcgaccggagacaagagt

SEQ ID NO: 339 - DNA, 1899 bp, synthetic construct
  source 1..1899: mol_type = other DNA
atgtcagatcaagctcgtcgcgcggctatacaagcacggattgcacagtcatctcgtgacgacgtcatccttgatgaaatgatacgtttgggcttttgggatgctggtggtgacccacacgctgcggagcttactgaaataatggcgcgatctaaggaaatccgttctgaattgagtcaactcaatagccaaaatgcccgttacttagaccctgaggcagccttaaaggcgatgcatgcggagcgcaaggcagcagctctcgctcgtcggaaggagacaaaactggcccgggcgcgagcgcgccaggcgcgggcagaggcgtgggctcaaagatcccgcgacgcggtctggcatctgggtcctggtgtgtccgctgcacttgaacagggcgagggcaagtccgcgccgcggtcgttagcgccggggcttccagctcttgccacaccagcagcggtagcgagcgctatgggtgttagcactggcgaactccgattcctggcgtacgcccgcccaatgtccagagtctctcattataagcgtttcgaaataactaagaaaagcggtggaaaacgtgtgatatcagccccaatgccgcggcttaagtatgcacaatactggcttctggacgctgtcttatccaagttacctcttcacccggctgcacacggtttcgtgccgggaagatccatacttacaaatgcccggccccatgtaggcagagatgttgtggcgaatatggatctccgggatttcttcccaacgctcgacgatcggcgtgtcaaggggcttttcgagtcgttgggctacggcgaggacgtcgcacaagttctcgctttaatcgcgaccgagcctgtaactgacgaaatagagattgatggccgggttacacacttggcccggtccccaagaagacgcttaccacaaggcgccccatgttcccctgctataaccaacctgatctgtcgcagattagacgctcggctggcaggcctcgcggctaagcttggcttcgcgtacacgcgttacgcggatgatttaacattcagcgcttcgggcgaagacgcaaagaaggttggagctttgctgagagcagcccaagaaatcgttcgtgcagaaggtttcgaacctcacccagacaaaacccgcgtcatgagaagaggtgcacgacaggaagtgacaggtctggtagtcaacgaccgtctgggagcaccacgtgaggccgtcagacgggcacgtgctgcacttcatcgggcggaacgtcaaggtgtggcgggattgaagtttggtagcggtcgcgatgcattggcggggctggtaggcttcgcccaatttgtagcaatgatagatccacggcaaggcgcttctcttgtagcccgtgcacgggctctgcgcagaggcgctgacgaaggggcaacgtccatgttgagtagagcgggactcgcgcgagcgggccttggggctgccgcactgagaaaggctgctgctgcaggggccccaccagaagcaatgcgctggcgcccggcggagcgaccagctccaactctcgaccccgtcttggttgaggctgaacgagctgcggcagccaaagcgcggcgagaggctgagaaggaaggatcacgccaagcgaaatccgcacgaagcggtacgtcagtaccaccagtacgtggcgctggtacaggcgcgagtggtggtggtggacccgctcgtgccgtctggggacgtactgcgaccccggagttgggtgagtcttctgccgagtgggcacgtccggcaaccccacgacgaagtttctggtcgttagcggtgaccggttggcttatactgatggcccttgcggtcttgccatttgccccctggcttacggcgttgttgggctatttagtttatcgacggttacgc

SEQ ID NO: 340 - DNA, 148 bp, synthetic construct
  source 1..148: mol_type = other DNA
taggatactagctcccccgcgtttcgcgggtcaggtaagttgtatgctcgcctgtggctcgaggctgacagatcctctggagtctcttactttgtagacatagtaagagactccatgattactgtcagcaatactgtgtagtatcctt

SEQ ID NO: 341 - DNA, 134 bp, synthetic construct
  source 1..134: mol_type = other DNA
ttctcttagactatacataggtttcctatgttgattcatacatggttataaatatgtaaataaaaggcgcaaaaccggtttcataaatgtctcccggtgttgccatcataatttacaacaattgtaagagaatt

SEQ ID NO: 342 - DNA, 147 bp, synthetic construct
  source 1..147: mol_type = other DNA
acgaacaatcacatgacatctgcaggggacagccgggattaaccgggattgtccgggatcagacggaaaagagccgcagttccaaggggctaggcgggccagcgcgtggcggcggcgcggcattcagtgccatttgattgttcgcag

SEQ ID NO: 343 - DNA, 153 bp, synthetic construct
  source 1..153: mol_type = other DNA
atctttacgcgattaaagccttatggcttagccgggtgtttagccaggctcgtttgattggatcgttttatcccgcagaatgcctctgcggatgtccgatcgcaagctcactcccatccacagaggcattctgcggttggtcttggtaaagat

SEQ ID NO: 344 - DNA, 214 bp, synthetic construct
  source 1..214: mol_type = other DNA
tatcataatgtaaactacattggctctttagcttaggacgaaattcgtctagtcgggtgtttagccagactctaatttattgaacgactttatggttgcgatatgttcgcaaccgtcattcgttcctcatgaaggttgcgaacatatcgcttcctctagtaaagagcaaagcccaagagcattgttcttgggcttttttgtttgtggactaaag

SEQ ID NO: 345 - DNA, 202 bp, synthetic construct
  source 1..202: mol_type = other DNA
taagcagaaacaatagcagaactgaaaggatgaaatccgtttcagcaggggagcgagtcgctgtccggtatggaaaagagaaacatgaaacgggaagatgctgcgaagtactattgcacacatccgtgtgcatcggtcgactttgcgaccctcggtacatcttcgcacttccggtatcgatgtattgtattgtttctgcttt

SEQ ID NO: 346 - DNA, 163 bp, synthetic construct
  source 1..163: mol_type = other DNA
ggggcaatagccataccggatcattttccggcccgtcggcgagtcgccgacggggactgttgacctatccatcagaccgcaatctgctccgatgtactaccacacacttcatgtgttttgggtacatctgcgcatcttacggtatcgcttttggtattgcccc

SEQ ID NO: 347 - DNA, 180 bp, synthetic construct
  source 1..180: mol_type = other DNA
agaagagttcttagccagaccaagctgggttgccattttggtctgagcggtgattcgccgctctagatgaaaactttggtttatcgtattaatgtttaattgcttctacctcagtttgaggtaggcgcattaaacattaacaattatttttgaagtaagaactctacttatttaagaaat

SEQ ID NO: 348 - DNA, 200 bp, synthetic construct
  source 1..200: mol_type = other DNA
acaacaccgttatccttagatgctactactttagtataaacgtgcacaatatctatttatatgaaagtagtgggaagtggttcgctttccgaggtgctatgtcaggactatatttaatgaagtaagcgtctaacttcatatatatgaagttagccacttacttcatcaaaaggattaaaggtaaggaggacggtgttgtc

SEQ ID NO: 349 - DNA, 163 bp, synthetic construct
  source 1..163: mol_type = other DNA
agttctttttagacgcgaagtatattatagtaatgtattagcgagtggatgttgtttcggcatccgagtttaaaactgaactttgtcatcgcaattctaaaggataaaatccagtaggttttatcctttagattcactcaagaattgtggagtaaaaagaact

SEQ ID NO: 350 - DNA, 175 bp, synthetic construct
  source 1..175: mol_type = other DNA
gaaagttctttttagacgcttttttattatgtatgtaataaacaaaaagcgagtgagtgttgttccgacactcgagttttaaacttagatactatcatcgcaaattttaagtgcaaaatccagtaggtttcacacttaaatttcactcaactattgagaagtattaagaactttc

SEQ ID NO: 351 - DNA, 194 bp, synthetic construct
  source 1..194: mol_type = other DNA
tgctgtctccttagattcacggatctttttagtttgtgcacaatatactaaaattgttttgtgtgggggatgattagtcctcttataagaaagtactactcatgaattgttcttttgtaagcaaacggctttacttacaagtaaagacctttactcacaaaacaaaatagttgatagggtaaggagacagcatt

SEQ ID NO: 352 - DNA, 260 bp, synthetic construct
  source 1..260: mol_type = other DNA
aatagaagtaccttggttttcagaaccaggtagggagtccctatctttattaatgttatttaatagctatgaatataagctctgcttatattcataccaagtgctagtcgcacttggtatgataaccttacgaaatatttaggatatttctaaggttatcaaagtgaaatgaaagaagcagatgttgaacactgaataacgagttattcagtgcccaacatctgaacgtgaaaaccaaggtgattttaaaggagattata

SEQ ID NO: 353 - DNA, 250 bp, synthetic construct
  source 1..250: mol_type = other DNA
tggaggagtcgaatccgttagccagcgctccggcgcaagggcggcgtcgcgccgtccgggcacaatcactggccactctccacaaggtaggctgttcttggtctgctcgcccagcaggggtactgcgaacgggctcagctggaccaaccacaccactgcggtttgagcccattcgcagtacccctgctgggcggcagaccggtgagcctaccgtgtcccatgatggtagtagcggcctcgactcctccgc

SEQ ID NO: 354 - DNA, 253 bp, synthetic construct
  source 1..253: mol_type = other DNA
cggaggaatcggaatcgttggcctgtacctcggtaaacgggcggcgatgcgccttccaggcacgatattcgatcaatcaccacaaggtaggctatgcgtggtttggctgcccggagggggtactgtggccggggatgtctgggccaaccacgcagtcgcggttcatccccggccacagtaccccctccgggcgccaaaccggtgagcctaccgtgtcccatgtcggagagtagcgattccgattcctcctcga

SEQ ID NO: 355 - DNA, 230 bp, synthetic construct
  source 1..230: mol_type = other DNA
ggggatgcggcggcgggccggaccttgcgacccgggcggcgtttcgccgtccccgcgatctggcttcccacgcgtcaccggctcgatcttcactgggccgaatttgcctaccatcgcgtggccgcggtgcgggttctgcgaacccagccacgcgatggtaggcaattcggcgtcgagtggaccgatccggtccttggatttgacgaaggcgcccgtccttcgcatcccct

SEQ ID NO: 356 - DNA, 2154 bp, synthetic construct
  source 1..2154: mol_type = other DNA
atgtggtcgcatccacagtttgaaaaagggggtggtagcggaggaggatctggggggagcgcctggagtcatccgcaattcgagaagtccggtgggtcgagcgggggttcaagtggctccgaaacacctggcacgtcagagtctgcgacacctgaatcttccgggggaagtagtggtgggagctctccccttcgtgtagaagacgagacgaaaataaacccggaagtttggtacacgcccgacaccgtaggaaaacttaacgtagagccgtttatggttacaatacgcgaccctgaggtacccgttcggattaagcaatatccgattccgcttgaaggccgtcaggggcttaagcctgagatacagagattaatcaaacaaggactgttggaaccttgtatgtcacctttcaatacaccgattttgcccgtgaagaaggcagatggtggctaccgattagtccatgacttgcgtgaaattaacaaaagaacagtaactagattcccagtcgtagcgaacccgcacactctgctgtcacaattaggaccgaacgaccgctggtattcagtgatcgacttgaaggatgccttctgggcgtgtcctttaaaagaggaatgtcgtaactactttgcattcgagtgggaagacccggacacgcaccgaaagacccaattacggtggacggtcttgccacaagggtttaccgagagcccgaaccttttcggccaagcactggaacaaattttacaggactaccaaatcggagatactttgacactggtgcaatatgtagacgacctgttaatcgcaggtgaggacgaagagcgggttcgtgaggagtctattaaactcctcaattttctttcactgaaaggccttaaagtctctaagagcaagttgcaattcgtagaaaaggaagtgaagtacctcggacatcgattatcacaaggtaccaagaagttagacccggaacgggttaagggcattctctctcttccctcgccgaaaacgaagaagcaagttagacaactgttaggcctgttcgggtattgtaagcagtggatagaggggtacagtgggaaggtcaagtttctctacacgaagattactaagaacggcctgttaaaatggacccaggaagacgatcaacgactcaaggaattaaagactgagcttgttaatgcgcccgttctttcgcttccggatcttaagcgcccattcttcctcttcgtcaacacagaagaggggaccgcattcggcgtgcttgcacaggagtgggccggcaagaagaagcccgtcgcatacatctcaaaacttctggaccctgtttctcggggttggccgacctgtctgcaagttgtcgttgcggcagctctcctggttgaggaagcgcacaaaatcacgtttgggagcgagctgcgtgtgttaagtccgcataacatccgaggcgtgttacaacaaaaggctgagaagtggattacagacgctcgcctggtaaaatatgaggcaatcctcataacatcgccgcaccttacgctggagacgacaagccttcaaaacccggctcaattcttgtacggagaaccatctcaagatctgttccacgattgtttgcggaacatcgaggagcaaaccaagattcgtccggaccttgaggaagaggaacttggtaagggagaaaagctgtttgttgatggatcaagtcgtgtcgtagaggggaaacgcaaatccggctacgcgataatagatggcaagacgtttaaggtgattgagtcaggtcctctgtctccgtcctggagcgcccaggcctgtgagttatatgcagttctgaaggctctccagcttcttaacggcaaggtaggcactatctatacagactcccggtacgcattcggcatcgtgcacacattcggcaagatttgggaagagcgcgggctgatcaacagccgaggaaagagtctcgttcaccaagaacttatttctcaaatcttacaagcaatacgcggcccatccgagatagccgtggtccatgtgaagggacaccaaagaggactgaatccattggttcggggtaacaacctcgccgaccaagaggcaaagcgagcagctctcagcgcactggacctgctcgagcaccaccaccaccaccactga

SEQ ID NO: 357 - DNA, 2160 bp, synthetic construct
  source 1..2160: mol_type = other DNA
atgtggtcgcatccacagtttgaaaaagggggtggtagcggaggaggatctggggggagcgcctggagtcatccgcaattcgagaagtccggtgggtcgagcgggggttcaagtggctccgaaacacctggcacgtcagagtctgcgacacctgaatcttccgggggaagtagtggtgggagctctgccctcacggaagttgatgaacaggaaatcgcggataaggtctgggccgaaaaagggggtgcatctagaatgcagatttcacctatccaggtgcaagttaagcctggtgtgacagggttatgtacaccgcaatatccgatgtcccgcaaaggtcgtgaaggtctgaagcccgttatagaacgactgttagagcagggtatgcttgagccgacaatgtcaccctttaactctccgatactcgccgttgcaaagaaagatggcaagtatcgcctggttcaggacctgagaaatatcaataaagtcatagtcccgcgtttcccaaccgtgccagacccttacacaatcttagggatgataccaacggagcaccgttggtttaccgtgattgatctgaaggatgccttttggtcttgtcccctggacgaagactcacggccgctgttcgcttttgaatggaccgatcccgagacaggcaagaagggtcagctgcggtggaccgtacttccacagggttatactgaaagtcctctgcttttcggtcaggctttatccgaaaaattacaggagtttgacaaagggcccgggattacactggtccaatacgtggatgacctgttactgagcggtaagaagcgtgaggaggtccgtcaaggcagcattcgactccttaattggcttagtaatcaaggtctgaaggtgagcaaagagaagctccagtttgttgaacagaaagtcaagtatctgggccattatttgcagcatggaacaagatcattggacccagagcggattagaggtattatggagctgcaacctcctcggaataaaacagaggtccgtaaggcccttggaatgattggctactgccggctgtggctggatcagtatgcggtccttgcaaaattcctgcatcagaaactggaaggtcccggtgaccaggtggagtgggttgaaaccgacagccaaaagtgggaaactttaaaagaagcattaacatccgcgccggtattggcgctgcccaatagcaaactgccgttccatctgtatgtttcagttgctcaaggagtggccataggtgttcttgctcagaaacgtggcggtaaatatcagccagtagcgtaccttagtaaggaacttgagcctgtggttaaaggttggccggtatgtgttcaggcggtcgccgcagccgcggtgctggtcataggtagcaagaaacttaccttcggcggggcgctcatcgtgcacagcccgcaccaggttaaccccgttttgagtcagctggcaacaacctggatgacggagggtagacttctcaagtacgaaacgatcttaagaacctctccagatgtagtgattgggacggatcgcaacttaaatcccgcagaattcttgtccggagaacgaaaagaatgggagcctgaagaccacgattgcctctcactcgtcgaaatgttgacaaaagttcgggaagatttggaagagacaccgctggaggaaggtgaaaaatggtttattgatggttcatcgcgagtggaagaaggcaaacgcaaaagtggttacgcgatcgttgatggcgtaggtgaagtcatcgaaaaaggagccctcagtccgacatggtcagcccaaaaatgtgaattatatgcactggcgcgcgcgctcgaacttgctgaaggcattcgagccacgatttggactgacagtaagtttgcgtggggcgttgtgcacacctttggcaaaatatggcaggagcgggggtatataaaagcgaatggaaaagaagtggaacatgtacagttagtggaccgcaccctggaagctcttaaactccccgataaggtggccatcgtgcatgtcgcggcccaccagaaaggggatacacctgaaatcgttgggaatcggtgggctgataaatgggcaaaggaggctgcgggagaacttaccttagcgctcgagcaccaccaccaccaccactga

SEQ ID NO: 358 - DNA, 2172 bp, synthetic construct
  source 1..2172: mol_type = other DNA
atgtggtcgcatccacagtttgaaaaagggggtggtagcggaggaggatctggggggagcgcctggagtcatccgcaattcgagaagtccggtgggtcgagcgggggttcaagtggctccgaaacacctggcacgtcagagtctgcgacacctgaatcttccgggggaagtagtggtgggagctctccccttacaatggacgatcagaatcagatcaatcctgatgtttggtactcgcctgatactatatcaaagctggaaatcccaccaattaaaattcagatatctgaaccgcacattccagtccgggtcaaacagtaccccatttcccttgagggtcgtcgtggtttgaaacctgagatagatcgcttgctgacccaaggcattctggaaccgtgtatgtctccgttcaacacccctattctgccggtccgtaagccgaatggtaagtatcgtttagtccatgacctgcgcgaaataaataagcgaacgattacgcggtttccggttgttgcgaacccttatacgttattatccaaactgggtccccacaactcgtggtattctgttgccgatctgaaagatgccttctgggcctgtccactcgccgaagaatgccgcgactacttcgcttttgagtgggaagatatagaaacgggtcgccgtcagcagttgcgttggactgtcctgccacagggcttcaccgaatcaccgaacttatttggacaggcattagaagaattactgaaagaatatcaggtacagacaggaaatgtgttattgcagtatgtggatgatctgctgattgcagggaacaataaagaagatgtgcgcaaagaatcgatccgcttacttaatttcttagcccagaaaggcctgcgcgtttctcaggaaaagttacagttcgtggaagaaaaagtaaagtacttaggtcattacctgtttaatggaaaaaaaattctggatccggagcggataaagggaattctggagctgcccatgccggtaactaaacgccaaatccggcaggccctcggtctttttggttactgtcgtcaatggatcgaaaactatagttttaaagtcaagtttttgtacgaacagttgtcgaaagacaaaattttaaagtggacacctcgcgatcaggaacagtttgccaatttgaagcgtgaattaagtcaagcaccggtgctgtccttgcccgacttaaaacggccttttcatctgtttgtcaatatacatgaaggtaccgcgtttggcgttctgacccaggagtgggcagggcagaagaaacccgtagcttacctctccaaactcctggatccggtgtcacgtggctggccatcatgcctgcagatcattgttgcagcagcacttctgctcgaagagactaatcggatcacgttcaatggagaagttgtgctgtatgctccacacaatattcgaggggttttacaacagaaggcagaaaaatggctgaccgataatagattattaaagtatgagggcattctcattgagagtccgaaattttcattaaaaacaattggtgccgtgaacccagccgagtttctctatcccggcgaaggcaatgaattactgcacaactgttttcagaccatagaacagcaaacacgtattcggccagatctggaagaagaagaactgcagtgcggtgaagttctgttcattgatggcagcagccgtattgttgaagggaagcgtctgtccggttatgcgattgttaagctggagaaaggcgaattcaagacaatagaatcaggtcctctgtctgctagctggtccgcgcaagcttgtgagctttatgccttatggaaagctttggtttccctgaaaggtaaagatgggaccatctacaccgatagccgctataccttcggcgtagtgcatacctttggaaaaatctgggaagaacgaggtttcatcaatagtcaaggaaaagaattgatccacccagaattgatacggagagtccttggggcactgaaagtcccaaacaagattgccgtcgtccacataaaaggacatcagcgcggcacgaactatcaggtccgcggcaataatgcggcagatatcgaagccaaaagagttgcgggtaattataacaccattctgactattcagctcgagcaccaccaccaccaccactga

SEQ ID NO: 359 - DNA, 2157 bp, synthetic construct
  source 1..2157: mol_type = other DNA
atgtggtcgcatccacagtttgaaaaagggggtggtagcggaggaggatctggggggagcgcctggagtcatccgcaattcgagaagtccggtgggtcgagcgggggttcaagtggctccgaaacacctggcacgtcagagtctgcgacacctgaatcttccgggggaagtagtggtgggagctctccgttaagagttgaagatgaaaaagaagtgaaccctgaggtatggtataccccggagacgattggtaaactgcagataccgccgtttagtgttacgataataaaccccgaagtgccgatcagaatcaaacagtatcctattccgccggaaggcaaatggggtctgaaacctgaaattgaacgtttactggaaaaagggcttctcgagccttgtatgagcccgtttaatacgccaatactgccggtcaagaagtcggatggtagttatcgtctggtccatgaccttcgcgaaataaacaaacgtactgttactcggttccccatcgttgctaatccgtatactctgttaagtcgtatagggcccgaaaatcactggtattctgtgattgatcttaaagatgcattttgggcctgcccactgagcgaggaatcgcgtaattacttcgcatttgagtgggaagacccagaaacacaccgcagacagcagcttcggtggacggtgctgccgcaaggcttcaccgaatcccccaacctgtttggtcaggcgttggaaaagatactgcaggaatatgtcgttaatgagaacacaatactgattcagtatgtggatgatctgcttatcgcaggcaaggaggaggcgattgtccggcaggaatccattaagctgctcaactttcttgcccttaaaggactgaaagtatctcgctcgaaattgcaattcgttgaagaagaagttaaatacttaggccattatttaagcaagggtgaaaaacgcatagatcctgagcgggtgaagggtattttgtcaattcctccaccaacaaacaaaaaacagatccgtcagttattgggattagtcggttattgcagacaatggatcgagaactattctagcaaggtaaaattcttatacaataagctttctcaggataatttgttaaaatggactatggaagatgaacagcatctcgagcagttgcgtaaagatctgattacagcacctgtcttatctctgcccgatttaaaacggccttttagtttgttcgtaaacaccgacgaaggtaccgcgtatggcgttcttacccaagattgggccggcaaaaaaaaaccagttggctatctgtcgaaactcctggatcctgtatcgaaggggtggcccacatgcctgcaggccgtcgttgccgcagcactgctggttgaagaagccaacaaaattaccttcaacggtgagctgcgggtcctgagccctcataatatacgtggcattctccagcagaaagcagaaaaatgggtaacagattcgcgcttactgaaatacgaaggtatcttaattgatagcccaaaactttccctggaggtcaccacactgcagaatcctgcacagttcttgtacggcgagccttgggacagccagctgatccatgattgttttataacgatagaaagtcagacaaagatccgccccgacctggaggaggaagaactgggtgagggggaaaagctgttcgtggatggctccagcagagttgtgaacggtaaacgaaagtcaggttatgcgattattaaggggccgaatctgaaggttctggaaagcggccctctgaatcattcttggtcagcccaggcctgcgaattatatgcagttctgcgcgcattagaatatctgcgcaataaggtcgggacgatctttactgatagtaaatatgcgtatggagtagttcatacgtttgggaaaatctgggaagaacgtggcctgattaatagccagggcaaggacattacccaccaggaattgatagttcaaatcctgaaagctctgagaagcccaaaaggaatcgcggtggttcatctgaaaggtcaccagaaaggcgtggatattcgtaaccgcggtaacaacgtagcagatcgagaagcaaaacgagctgccttgaaggattggacccctctcgagcaccaccaccaccaccactga

SEQ ID NO: 360 - DNA, 2181 bp, synthetic construct
  source 1..2181: mol_type = other DNA
atgtggtcgcatccacagtttgaaaaagggggtggtagcggaggaggatctggggggagcgcctggagtcatccgcaattcgagaagtccggtgggtcgagcgggggttcaagtggctccgaaacacctggcacgtcagagtctgcgacacctgaatcttccgggggaagtagtggtgggagctctgttctgcgtgaggaagacgagaagaagataaatcctatagtctgggcaaagcctgggaacccggggctcatgaacgttacgccggccaagatacatctcaagactgacacccctgtatatcggcctcaatacccaatcagaccggaagctgaagaggggctcaagcctgtggtgagagagctgctggatgacggcttgatagaacctagtgacagcccgtactgcactcctattttgcctgtaaagaaacctaatggaacctggcgcatggtccaagatctgcgtgaagtgaataaagtggtcatcccacgtgcgcctatcgttcccgacccccatacaatactgcgtagaatcccggacactcacgtatggtacacagtaatagaccttaagtcagcattcttctccgtacccgttgatcctgagagccgccctatctttgccttccaatggccgcacccggagacaggaaagctgaccagattccaatggaagatcctttgtcaaggttattgcgaaagcccaaccatcttcggtgagatattggaagagttgcttcaaggatggtcaccacccgagggcacattgctcacccagtacgttgatgatctgcttatatcaggtgaggaaggtaagcaagtgagaaaggcctcaatatccctcttaaattttctgggtgaaaagggcttgcgcgtctcacttgacaagttacaattttgcgagccagaagtaaagtatctgggcttaattctcaagaagggtacaaagtgtattaaccctaagcggcttgaggggatacaaaacttggagatgccgaaaactaaacgtcagctgcggtcatttattggaacgataaacttttgccgacaatggattgagggattttccgaattaatacaacctttcctgaagaagctgttaaaagaggagccggagacactcgtgttagaaaaggcagactacaagttgttcgaacgcgtcaagaaggttctggtatcagccccggcattagggttgccgaaccctaacaagccgacgcacttgtttgtcaccacgggcaacggggtcgcaaagggtgtcttagcgcaaaagaaagcaggtcaataccagcctatcggttatttatccaagcatctggacgctgtggtacttggttggcccacatgtttgcaagcgtgcgctgcagctgccgaattagtgaaactgacgagaaagttataccccttcgaggctatcgtactgcatagtagccatcagttaaagacaattttaacgcacactgcaagacggtggatgaccgactcccgcttactccaaatcgaagctattttacttgagaaaccggacctgctgttaaccacaacggatcattacggtccagcaggtggtttatccgaggccgtccgtaaagagatgtgcaatgaacatgactgtatagccattacggatcttcagactaagtttcgggaagacttgcaagaggagccgatagagggcgcctggaacttatacacagacggcagtagccgtgtagtcaacggcaagcgaatcaccgggtacgcgatagtggaagacggtggtttagaggtggagacgggtcccttaccgccgagtatgtcagcacagactgctgaattgtatgctttaaaacgtgctctggagataggtaaggaaaagaatgttaacatatggacggacagtaagtacgcctgcggtgttgtgcatgttttcgggaagatatggtctgagagaggtttgttaacatcgcagggtaagaacttagcccaccatcgtctggttttagacacgttggaagcactgtcatttccaagtcgggtagctataatccacatacccggccaccaaaagggaaacgctcccgagatcgtcggaaaccgtttggctgacgaattagcgagacgggccgccgagcgagaatttgacactgcacgacttgctgctttaatcctcgagcaccaccaccaccaccactga

SEQ ID NO: 361 - DNA, 2148 bp, synthetic construct
  source 1..2148: mol_type = other DNA
atgtggtcgcatccacagtttgaaaaagggggtggtagcggaggaggatctggggggagcgcctggagtcatccgcaattcgagaagtccggtgggtcgagcgggggttcaagtggctccgaaacacctggcacgtcagagtctgcgacacctgaatcttccgggggaagtagtggtgggagctctgagggggcagatgagatattgaataaaataccggagggggtttggagtactggtccctacgatgttggattctgtaaaaaatacaaacccattgaattaacggtaagcgacacgcaagtggtataccggaaacaatatcaatggccagcagaggcagacagtggcatggaggagacgcttagaggtctgtggcaagcaggggtgttggaagagtctcattcgctgtggagcacgccacttcgcccagttaaaaaagccgatggggtttcatatcgtatggctcatgacctgcgtgcaataaatgatgcgatcatgacacctgtgctcccggttcctgatcctcatcgcatcctgaccagtctttcaccgaatctgaagtggtttacggtaattgatctggccaatgcgttcttttgccttccgctgcatccgaacacgcgtaaatacttttcttttacgtacaaacacacacgtctgcagtacaatcgtctgccacaaggatgtaaaaatagtcctggtttattcaatcaggctctcaaggacatgttaagtgatctccaacttccgaataattgcgtcttggtccagtatgttgatgacctcctgctggcatgcgagacaccggaggtttgcctggaagcgaccaaacgcctgttattgaagttgcactcctgcggctttaaagtctcccggaagaaactccagtgctgtcgcaaagctgtaaatttcctgggtcgtgtcgtaagtgcacacggcagcacgatgtcaactgctcatcgaaatgccatccttcaccatcccaagccggaaactgtcaaagacatgctgagctttcttggcttatgtggttactcccgtaattatattagctgttttgttgagagaatagctcccctgcgggccctgattcgggagaaaggcaacaaaaacactacagctcaactgaattggactgaggaagcgacgaactgtttcataagcctggttggggcacttgcgtcggctgcagcgctcgctgtccccaattatgatctcccgttccacctgaacgttagcctctccgcgtccgttgtgaacggtgtactttttcagaaacgagatgggggtcgttgtgtcatgatgtactgttcgacgactctcgatcccatggagcagaaacaaccgcaatgtacgagatacgccgccggattagccacattgatcacgaaaaccgcacacattgttaaaggctacccgctgaatatacttaccgaacatagtgttagcgcatacgttgcgagtgcctcatttacaatgtcctccttgcggcagacaagacttatgaaaattctgcaggctcccaatattcagtacgtacatactggcatcaatatggcggattgtattggcgcaacagggaccccacatacttgcgtgttccaagtgcaacaagatcttaaactcagacctgacttgcagacctccccattgggaagaggccatctcgcctttacggacggatgttgctatcggcagaccgatgggtcacttcgcgctgccgcagcggtagtgcgttacgattcaggatcggacgtttttactaccgtggcgactgtgcagctgccggatagcccgtctgcccaagcagcagaagtgttggctctgtgtctggcactggaagcttacgtagatcaagaggttacggtgtattcagatagtgcatatgccgtaagcgcagctgtcttagatctggctgcttggaagcgaactggcttcgtgactgctaaaggggttcctatagcccatcgcagcttaatggaacggctggctgtgtccattatgttacctcgtgccgttgcaattgtgaaaaccgcgggccatagcaaagcaaacacgatgactgcgcgtgggaatgacgcagccgacagagccgcaaagaaagcagccggatatcagctcgagcaccaccaccaccaccactga

SEQ ID NO: 362 - DNA, 2208 bp, synthetic construct
  source 1..2208: mol_type = other DNA
atgtggtcgcatccacagtttgaaaaagggggtggtagcggaggaggatctggggggagcgcctggagtcatccgcaattcgagaagtccggtgggtcgagcgggggttcaagtggctccgaaacacctggcacgtcagagtctgcgacacctgaatcttccgggggaagtagtggtgggagctctacggtttccctgcaagacgaacacagacttttcgatatccctgttacaaccagcctgccggacgtctggttgcaagatttcccacaagcctgggctgagactggcggcctgggccgcgctaaatgtcaggcgcctatcataatcgatctcaagccgacggcagttcctgtaagtataaaacaatatccgatgagcttggaagcacacatggggattcgccagcacatcattaagttcctggaattaggggtgcttcggccatgtcggagcccttggaacacccctctgttacctgttaagaagccgggtacccaagactatcgaccggtacaggacttgagagagatcaataaacgtactgtggacatccacccaacagttccgaacccgtacaacttattatctacacttaaaccagactacagctggtacactgtgctggacttgaaagatgccttcttctgccttcctcttgcgccgcagagtcaagaactgttcgcgttcgagtggaaggaccccgaacgtggcattagcggacaacttacctggacacggctcccgcaaggctttaagaattcgcccactctgttcgatgaggcacttcatcgggacctgaccgacttccgaacacaacacccagaggtaaccctgctgcaatatgtagacgatcttttattggcggctcccacgaagaaggcatgtactcaagggacgcggcatttgttacaggagctcggggagaagggttatcgggcaagtgcgaagaaagcacagatatgccaaactaaggtcacctacttgggctacattctttcggaaggcaagcgctggttaactccaggccgcattgagacagtagcacgaatcccaccacctcgtaatccccgcgaggtacgggagttcttagggactgccggtttctgccgattatggataccgggtttcgccgagttggcggctcctctctacgccctgactaaggaatccacgccattcacttggcaaacagagcaccaattggctttcgaagcgcttaagaaagcgttgttgtcggcgcccgctctcgggctgccggataccagcaaacctttcaccctgttcctcgatgagcgtcaaggtatcgcgaagggagtgttgactcaaaagttaggtccatggaagcgcccagtagcgtacttgagtaagaagctcgaccctgtagcagctggctggccaccctgcttaagaatcatggcggctacggcgatgttagtgaaggactcggccaagctgaccctgggtcagccgttaacagtcattacgccgcacaccctggaagcaattgtaagacagccgccggacagatggatcacaaatgctcgtcttacgcactaccaggcgcttcttttggatacggaccgcgtccaatttgggccaccagttacccttaatccagcaaccttactccctgtccctgagaaccaaccttcccctcacgactgccggcaagtgttggcggagactcacggtaccagagaggacctcaaggaccaagaattgcctgacgcagatcatacttggtacacagacggctcttcttacctggatagcggaacgcgcagagccggtgcggctgtagtggacggacacaacacaatatgggcccaaagtcttccgccgggaacctctgcgcagaaagccgagctgattgcactcactaaggcgctggaattaagcaagggtaagaaggcaaacatatacactgacagcagatatgcattcgccacggcccacacccacggtagtatatacgagagacgagggcttttgacctcagagggtaaggaaatcaagaacaaggcggaaatcattgcgcttttaaaggctcttttcttgccccaagaggtggcgattatacactgtccaggacaccagaaagggcaggaccccgttgctgtgggcaatcgccaagcagaccgtgtcgcccggcaggctgcgatggcagaggttttaaccctcgagcaccaccaccaccaccactga

SEQ ID NO: 363 - DNA, 1992 bp, synthetic construct
  source 1..1992: mol_type = other DNA
atggctagcgcatggagtcatcctcaattcgaaaaatccggaacgccggaagaaaaagagacattacttgcggacgtacccgcctcggtgtgggcaaaagatagttatgacattggaacgctcacgacggctccgccgctgataattaaggcgaaacctctgtcaagatatcctgcaaaggctcaatatccgttatccaaagaagcggaagaaggaatcgaacctactttcaacgcgttgcttgagcgcggcgctatcgtcccttgcccatactccccgtgtaacactcccattcttccgattaaaaaaccggataatacttggcgctttgtacaggatcttcgtttagtcaatgaagcagtagaaccaagacatcccatagttccaaatccgtgtaccatcctttctactattccatcaaatgctaagtgtttcacggtgattgacatcaaaaatgcatacttcagcattcgcgtcgacccggccagccagttttggttcgcctttacatacaaggggcagcggtttcagtgggcgcgtttagcgcagggatatgtggaatccccatcatacttttgtgaatgcttaacggaatgtttatcgaagtttaccccgcctgggggctccacgatcattagttacgtagatgacattcttctctcatctccgtcgaagaaagtttgtaagatggacacagtcgcgttgcttacctatctggccattgtcggcctgaaagtgagtaaacagaagctgcagctgtgccaagaaagagttaagtatctgggccatatattgaccccaggttctcgggccttagatgcatcccgtatctcagcgatcaccgcttgtccccgtcctaaaactaaacaacaattgttaagatttctgggtatgaccggatattgccgcgcgtggatactccactatgcagagcgtgcacagccattacagagttgtgcaaatgcatgtaaaaatctgacggataatctgacctggacagatgattgcgataaagcgtttgtcgatcttaaagtcgccctggctagtacacctgctctgggtttgcccaactatgatcttccattccatctgtttgtttgcgaaaaagctggttttatgtcaggggtcctgtgtcaacagcatggtgggcaatatcgcccggttgcttatctgtctaaacatctggaccctgttgctcgaggtatgattccgtgcctgaaagcggttgctgcggctgcctctggcgttctcagctgtgcagatcttgtactgctgcacccgctgaccgtgcatgtgccacacgaagtgcattctttactgatgcaggccaaaacttcccatctcacccctgcacgcttactgtcctatcaacatgttctgctgacattgagccatgtgaccctggcccgttgcacgagtctcaacccggcgacattgctcccaacacccgatgatggtgacactcatgattgttgcgaagtggttagtatttgtacaaaacctcgacccgatatcagcgagataccgctgaccaaccctgacttggtattctttgtggatggtagcagtatgcggttaggttcgggagaggttgggtctagctacgccgtggttaaccactttgaagtagtcgaagcttattcgattcccggcacttatagcgctcaggccgccgagttagtggcgttgctgcgtgcttgcatccttgcgaaaggcaaaagtgtatgcatctacaccgatagccgatactgctggggtattgttcacgaccatggggccatttggaaagagcgtggtttcctgacagccgcgggaaaaccgatacaacataaagacctcattgcatctttgcttgaggcaatccagtttccagcctcagtggcagttattaagtgtactgcgcactcaaatcacaaagatgaggtatcatctggcaataaccgcgccgatgccgcagcaaaggccgcagcaaaaggcggccagcggatataa

SEQ ID NO: 364 - DNA, 2001 bp, synthetic construct
  source 1..2001: mol_type = other DNA
atggctagcgcatggagtcatcctcaattcgaaaaatccggaaatcatgttcgcgcggacgagatgctcgctacaattcccgaatccttatggacctctcatcctcacgacgttggtcgcatcgaaggcgaagtcgttctcacccttaaaccaacggttaccaaacccatctggcgggcgcaatataaactcaaaccggaacaagtggaaggcattgcagaaacggtaacaggtttacttcgtgccggtgtgttacgcgaggcggaaggagcgcgttggaataccccaattctgccggtgccaaaagccggaaacaagggttggcgtatggtgcacgacctgcggctcatcaacgaagcaactactactctggcgctgccagtcccggatccctatgtggccttacgagcaattactcctgaacaaaagttctttagcgtctgcgaccttggtaacgctttcttttgtttacctttggccgaagaatgccaggagtggtttagttttacgtatggcaacaagcagtacacctatacaagattagcgcaagggtataaagattcaccgggtctgttcaatcaggctctgaaccaaatcctcgaaaatatgatactcccagagggggcgaccatcatacagtatgtcgacgacctgctggttgctactaagaccgcagaggattcactggcggcgactaaaactttactgatgacgttagcggatgcaggttttaaagttaaaagagagaaatgccagattactcgtagatcagtagaatttttagggcgtattgtaggtgagcatgggaccgcaatgagcgatatgcatcaggatgctatactgcagtatggtaaaccgaaaacggtacaagatatgttaggtttcttaggactgtgtggatattcacgcacttacgttcctgaatatgttacgttgacccagcctttgcgtgaaatggttacagaagtgggccatcgtgctctgaaagacgaccttaattggaccgtagatcgggataaagcttttcagaaagtgaaaagtgcactgtctgctgcggcccatctggcatccccgaattatgaaaaggatttttaccttgatgtcgccgaaacagagggcatagtgaacgctgttctgtatcaacgggaacgaggggagcgaaagattctttcatactttagttgtaaacttgatagcgtagaggtgggaaaaccgccctgcataagatttctggccgcattggcgaaggcaatcgagaaaactgcacacatcgtgctgtgtcacccactgattgttaacacggatcactcggtcaccgctttgctggcgagcagtgccttctctttttccgctacacgccagatcaagattgatgatacattgaaaggcccgcacataatgtttaaagcacctaaagataatcatgccaacatggccaaaggagttaatggcgggggcttgcttcagcatgattgtattcgccgcgtcgagggtgacagcaagctgcgcgagaatctgcatgcgacgccgttagacgaccccgattgggaattgttcacagatggctgttcgtacaagagcgacattggtaatcgggcgggttacgcggtggttaagtgggataatgataaagccgatattatccaggctggcgaaatacctcagccggcgtccgcccaggttgcagaaattaaagcactgaccgaagcgcttaaactctctgctgggcataaagtcaatatctacacagatagtgcttatggctttggtgcagtgcattatgaaggaccggcctgggtgcgtcgtaagttcctgaccgccgctggtacgcctgtaaaacatgaacaccatcttcgcgaactgattgaggccttgaacggaccaacagaggtagcagttattaaagtaacaggccactcgaaaaaaaatgataaggaatctaatgggaacgcagcagccgacgcagccgctaaacttgcctgcaattatccggtcaaataa

SEQ ID NO: 365 - DNA, 1995 bp, synthetic construct
  source 1..1995: mol_type = other DNA
atggctagcgcatggagtcatcctcaattcgaaaaatccggaaaccatccagactctgatgatattatcaatgctatgccggcctcactctggtccaccggtcctgctgatgttggaaaactgcagattccgccaatcaaaattaacctgaagccagatacagtccctatttggaaatatcagtaccctttaagccgggagaaaattgatggaatacgccctgtgatcgaagatctgttgcgctccggagttttgcgccaaacggtgagtgattggaatacgccgatactgcctaccccaaaacctggcaagaatgtgtatagaatggtccatgatctgcgtccgattaaccaggtagttttaccgtcacattgtaaaacccctaacccatttgtgatgttaacatcgatcaccccagaccacaagttttttaccgtgatcgatctggcaaacgcatttttttctgtgccgctgcatgaggattgccagaatatattcgcctttacatacgagaattctcagttttcctatactgttctcccgcaagggttaaagaattcgcctagcctgttcaacaacatactgaaaacccacctgagcgaattaaccccgcatctgccgccaaataccgtgattctgcagtatgttgatgatattcttatcgcagctccctcaacagctaaaaaccttcaggccacaagtttggtcctgcactttttagcgacaaaaggttacaaggtgtcaaaagacaaactccagatttgccgcccgactgtacattatcttggccgtttgataacatctggagccacgtcaatgagtcccgaacataaaagttcaattcttaaccacccgaaacctaatactggcaaaagtctgctgtcctttctgggtttaacgggttattccaaacaattcgttccaaattatcaagaccttgtttctccgttacgtgccttaattcgtcagaaaggttatgcaaatctgaatgctcccctgcactggacgcccgaggcagaaatttgcttcaccgcgttgaaacaagctctggctcaggcaactcagctcaacccgccggattattctttaccttttcaccttgacgtctcggagcaggaagggacggtcaaagcggtactctaccagaagcaaggtggtactcgaacggttctcatgtattacagtagcaaactggacaatgtggaaattggccacccgccctgtactcgccattgcgctgcaatcgcgaaagcgttgattaagacagcccatatagtaatgcaacatacagttcatgtccatacaaaccatggcgttgccgcattcttagacagcaccgcgttcaccttatcgacgaaacggcaacagaaactgaagaacatccttgaccagcccaatgttctgtacacgagcgaaggggtgaatatggcagcggagattagtactcagggcgagcctcatgattgtgccgtgctggccgaaaccgatatgaagatcgtagaaactcttaccccaaatccgattgaaaatccagatctggtccttttttgtgatggcagctcccgtcggagattagacggtacattgtctgcagcttatgccgttgtaaaacttgtacccaaaagtcagttggtgaccatagaggccactcatattggaaataattcagcgcaaaaagcggaaataatggggctgactgcagcattaaaccacgctcacggcaaaaccgttaatatctacacggacagcgcgtatgctcatcacgcggtatatgtcgatcttccacattggtcgagaaaaggatttgttaccgctactgggacgcccattaaacacctgccggaaatcattgcactccaggaagcgctgagccgtccgaagggtgtggccgtattgaagtgtaaaggccatcaatcagataacacaatcgtcgccaaaggtaatgcagccgcagacgaatctgcgcgccgattgacagaagatgataagatctaa

SEQ ID NO: 366 - DNA, 1995 bp, synthetic construct
  source 1..1995: mol_type = other DNA
atggctagcgcatggagtcatcctcaattcgaaaaatccggaaccccgtctattccaaatcttcatggtgtgccaagtagtctgtgggcaacacataaagaagacgcaggactggtcgcttgtgcgccgtatgaggccagcattaagcataccgaccccatatacaaaaaacagtatccactcacggaagaaaaagccttaggtattgataaagtactgcatcagttactgctgcagggtgttgtagtgccctgcaaaagtccatacaacactcctatcaatccagtcaagaagcctgacgggacttggcgtctgacccaggatctgcgggcaattaacgacataattatccccgtttcaccgattgtgccggatgttccgaatatcatggcatccatcccatccagccacacacatttctctgtggtggatctgtgctccgcttttttctcaattcctgttgaaccgcagacccagccgctgtttgcctttacgcatcgcggacgtcagtatacatggactcgcttgccgcagggctttgtagatagccctgccgtatttgcactgaccgttcggcaatgtttaacggatgtatgcctgccgccaaatagttgttttctgcaatacgcagacgatattctcgtgactggccaggatgaagcaacgtgccaccaagcaacaattgccgtcttacaacgtcttgccgagacaggctttaaagtttccccctcgaagctgcagctgtgcaagacgtcggtcacatatcttggttatctcatctcgcaaggtagcaaagccttgacgccgagtcgcgtttcaattatcctcgaagggaaaaaacccgctaccaaacaggcgatgatggcattcttgggactgatcaattattgtcggcagtggatacccgactgctcgtattacgataagtgcttgcgatcagcgtttacccacagcgatcctatgtcttcattaatcacatggaccgaggagatgacccaggcgtatggagcgttgaaaaaagcattgtgctcagcccctgcgctgggcttaccgaactatgacttgccgtttcatctgtatgtcacgcatcatgccgatacagcatcagccgttttagctcaggagcatggtgggagtttcagaccttgcgcttttttgtccaaaacattagacactgttgcgcaaggtttgcctacgtgcctgaaagctatggcggctgcagcactgatggtgctggacgccgagaaattagtgctcggccatccgttggtgctgcactgtgaacatcaaatacaatacatgttaaagcacctttcgacccagcatcttagcgtccaacggcgctgtggatatgaacagactttacttgcaaccgagaaccttaccataaagcccacttctagtatggataccgttgcccacgccctgcagcgctttctgcaagtccctgcggatcatttctcagaagatcacaattgtgtcgatagcgtggtatccgattgttctttacgtccagatttgaagtctacgccgttacagaacgtacgaaatctttacgtggatggatcttgtagcaaacctcaggatggcgtttatcttacaggctatgctgtttgtgaactccctgacacagtgctggaagccgcggccattccattctcaagcgcacaggctgcggaactgattgctctcactagagcgtgtgttctcgctgccgaccaggacgtcaatatctacaccgatagtagatatgcgtttggtgtagctcatgattttggtgcgatttgggcatcgcgtggcttcgttgccgcggacggcaaaccgatctcccactcaagccttgtgatggatcttattaaagctgcgcgcctgccacgttctttagctatcataaaaacgcgtgggcactctactttcgatacagaggaagcaaaaggtaataactttgctgatactcaggcgaaactggccgcacaaagtgggaaacaaccgtaa

SEQ ID NO: 367 - DNA, 2025 bp, synthetic construct
  source 1..2025: mol_type = other DNA
atggctagcgcatggagtcatcctcaattcgaaaaatccggatctacacagatggagagtgattcgaaacgcgaggaaatgttacaaaaggttcctgagtgtttatggtcgcaacactcaaccgatattggactggttaaaagtgcgcagcctgtcaaagtggaattacgtccgggaacttcaccgccctggaaaaaccagtatcccctcaaagaggaagcgatccggggtattgagccacagattgaaggtctgctgaaagcagacgtactgaagattacacaaaatcctcagagtaatacgccattgctgccgctgaaaaaaccggacggctcgtatagactggtccatgatctgagagctgttaacgaggtggtggccgattttcctgctgaagttcctgatccgcataccttgctggcacaaataccgcccgatgcaacacacttcactgtcttagatctttgcggggcgtttttttccgtcccgttgtctatagaatctcagggcttttttggtttcacgtacaacgggcagttctacgaatccaaaagactgccgcaagggtttaaacattctccacacatctttaataaggttttacgggaagatctggccggaatcgaccagattctcaaaagcaccgtcgtgcagtacgttgatgatattatcatttgcagccctgacgaagagacgtgtcataaagactcgattaaactgttacagattcttgcggaaaaaggccacaaagccagccagaaaaagcttcaatattgccgcgagaaagtgatctatcttggtcaaacaattaccaagggtcatcggagcatatccgattctcatcttgaagccattcgtaaagcccctaaaccacgaacagtacgcgagatgctgacgtttttaggaattgcgggttacagctcatcatgggtggaagactatgcatctttaaccggtcctttacgcgcaatgattaaagatacgggcaatgcccagttgcattgcaatcttagttggacacaggacggattacttgctttcgaaactatcaaacagcgtttgcaggaagccccggcattggccttgccagactatagcaagaactttttgctttatgtatccactagcaccggcgggcgctatgcgtgtgctgttttgtgtcaaccgaccgggactgggaccactcctcagcccatcagttactactcaacagctttcagcgaagtagaactgggcttaccgctgtgttatcgcgcactcgtcggcgtaagcctgatgtatgataaagcgagttctgtgacgatggggtatccggtaacgattcttacacaccactcagttcgtaatcttttaaactatggcaagtatactctcactatgagtcgtctccgtgattatcatcgactgctcgaacaagaggatgtaacgttggtacgatgtgttacggtcaatccggcggagagtctgccaacatccgaagatggtgagccacatgattgtatccaagaatctgagaaatactcaaaactgcggtctgatctgcaggccctgcccctgtcagaagcagacgtggagtattggactgacggttcctgctatcgcgttggagataagctgtcagcgggctacgccgtcgtcaaagcccaaggtaccgaatttgtagttgaaaaagcgggtatagttccacagcccgctagcgctcaattagctgaactggtgggtttaacagaagcgtgcctgctggcagagggtaaacgtgtgaccatctacacagattcggcatatgcgcataatgtttgccatctctttggcgccgtgtggaagaaccgtggcttcaaaaaaaccgacggaagtccaatacagcatcacgcccagataatgaagttactgcacgcaatgatgaaaccgaaggaaatcgctattgcgaagtgtgctgcacataagatggacgtgtccaaagttacccagggtaataaggctgcagatgaagcagcaaaagctgtgaccggcgccgataaactttaa

SEQ ID NO: 368 - DNA, 1998 bp, synthetic construct
  source 1..1998: mol_type = other DNA
atggctagcgcatggagtcatcctcaattcgaaaaatccggatcattaacgcccttcgagcgtgaggctttacttgcttcagtacctgaatcggcctgggctaaggactcctatgactttggtacgctcactacggcaccgccacttgtgatccatgcgaaacccggaagtcatttcccggcaaaagcccagtacccattgtctaaagaagcggaaaaaggaattgaagcaacttttaaagcgttactggaacgcggagcaatagttccgtgtccttccagtccgtgtaatacgccaatcctgccgattaaaaaacctgataatacctggcgttttgtacaggatcttcggctggtcaacgaggcggttcaacctcgtcacccaatcgtacccaatccgtgcacaattctttcatcgctgccgccagacgtaaagtgtttcacagttatcgacgtaaaaaacgcgtatttcagcattcgcgtggatccgagttgccagttttggttcgcctttacgtttaaaggtcagcgctttacgtgggttcgactgcctcaggggtatgtagagtcaccgtcgtacttcaatgagtcgttggtcttttgtttaagtaagttcacgccgcctggtggttctaccatcatttcatatgtcgatgatattctggtggcttctccatcaaaagagatgtgcaagatggacactgttgcgttacttacttatctcgcaatcgtaggactgaaagtcagcaaacaaaagctgcaactgtgccaggaacgggttaagtacctcggacacatactcacccccgggtgtcgcgctttagatgctagtcgcatatcagccattactgcctgcccaagaccgcgtacgaaacaacagctgttacgctttctcggcatgacaggctattgtagagcatggatactcgattatgcggaacgtgctcagccgttgcagacctgcgctaacgcgtgcaaacacctgacagaccatattacgtggaccgacgattgtgataaggcgttcgtggatttgaaactggcgttagcatccgcacctgccttagggatgcctaactacgaccttcccttccatctgtttgtatgtgaaaaagccggctatatgagcggagtcctgtgtcagcagcatggcgggcaatatcggcctgtcgcatacctttccaaacagttggatcccgttgcacgaggcatgattccatgcatgaaagcagtcgcagccgccgcatctggcgtgttatcctgtgccgacattgtgctgctgcatccggtgaccgtccatgtgccgcatgaagttcatagcctgcttctgcaagccaaaacaagtcacctgacaccagcgagactgctcagctaccagcacgttctgcttacattgagccatgttactctggcccgctgtactaccttaaacccagctaccttactgccgactgccaatgatggggatacccatgattgctgtgaagtcgttaccatgtgtaccaaaccccgtccagatatatctgaaacgcccttttctaatccggatctgattttttttgttgatggttcctcaatgcgactgggctctggtgaagtgggaagtggctatgcagtagttaaccaatttgaggtggtggaaagctattcgttgccgggcacattttctgcgcaagcggcggagttgatcgcactttttcgtgcttgcatcctggctcagggtaaaagcgcgtgcatctacacagattcccgctattgttgggggatagttcacgatcatggcgccatctggcgggagcgtggtttcttaacagccaccggtaaacctattcagcataaagacctcatagcatctttacttgaagctattaagtttcctactagcttggcggttattaagtgcgctgcgcacaacaataccagtgatgaagtgtcactgggtaataatagagtggacgccgcagccaaggcagctgccaaaggtggtgtgcgtatttaa

SEQ ID NO: 369 - DNA, 1998 bp, synthetic construct
  source 1..1998: mol_type = other DNA
atggctagcgcatggagtcatcctcaattcgaaaaatccggacccttgtctgaggagcataatgtcttactggcctgcattccgcacgatctgtggtcgcagcataagaccgatgtgggcttagtcagatctgcgcaaccggtacacattaaagttaaaactggcatcatgctgccatataagcgtcagtatccgctcaaaccccatcaaactgagggaattggtccaacgattaaaggtctggtggcagcgggggttctgaaaacaaccaagagtccctgtaatacgccgatcttcccgataaagaaaattaattcaggtgactaccggctggttcacgatctgcgtgcaatcaactcaattgtggatgcggaaacacctgtcgttcccgatccgcataccttgcttagtaatatcccgcatgatgcgtgctggtataccgtaattgatctttgctctgcctttttttctgtaccgctgcatccagactctcagtacctttttgcgtttacgtataaaggtcagcagtacacgtacacccggctgccacagggttatgttgaatcaccgtcggtttttaaccgtgtgctcgctaatgaccttcagcatcttgatgtgactagcactgtactccagtatgttgatgacctgctggtgtgtagcaatacccaggaacagtgtactcaggattccctgacggtgcttaaagcgttagaaaaaggcggacacaaagtctcaaaggacaaacttcaattctgtcaaccacaggtcgagtaccttggtcgccagctgtgtggcaacaagcgcgctatagccccgagccaaatagaagctgtaagcaaggctccaaaacctttaaccgtttcccacatgttatcatttcttggaatgacaggctttagtcgcccttggatatgtgactatgctattaaaacggcaccactgcgtggattgatacgcgcagcagggcagaataatggttcagccgtattacactggactactgaggccgagggggcgttccaagcattaaaacaagatctgcagacagctccggcgttaggtaaccctaattatgctaatatgtttcatctgtatgttgccgagaaaagtggctatgcttgtgccgttttgatgcaagacacaccaaccggcaagcagccattggcgtactattccacgaaactggataatatcgaaatgggattaccgccttgttatcaaggtctggccgcggccgcgtttgcattccagaaagcttcggcaataactatgggccaccccaccacgctctacacaagccaccaattgcatgctctgattacctctccgagatttgttttaacccaagcgagaaaaacaggttatgaagtgatcctggccgctccggaactcaacattcagcgatgcgcaacaatcaatcccgcgacccgcatggtcatcccgttggaaggcaccccacatgattgcatacggagcactgacgaattcctgcgtccccgtcaggatctgcataaccagcctattcctgcagaattaacccttttcgtcgatggctcttgctttcgagataatactggtaatcatgcagggtatgccatcgtgcagttacatccggatgacacgttcacggaagtgcaaacaatcaaactggcccagccttgtagcgcacagttagccgaaattaaagctcttacagcagcctgccagctcgccgcgggaaaaacactgaacgtctataccgatagtcaatatgcgtacgccgtttgccatattcatggcgtgatttggaaacagcgcgggtttttgcgggcagacgggtcgcctgtaacgcatggagaagcaattagtgcattgctggacgcgatacaccatcctaaagctctcgcaattatcaagtgcgcagcccaccaaaagattgattccttaattgcaaaagggaacaacctggctgatgaggctgcgaaacgtgccgcgacatccacttgtatcggttaa

SEQ ID NO: 370 - DNA, 1995 bp, synthetic construct
  source 1..1995: mol_type = other DNA
atggctagcgcatggagtcatcctcaattcgaaaaatccggatgtttgagtttagaagaacaagagactctgttcgcttcagttcccgactcaatttgggccaaagatgattatgattttggaaccctgagtactgctccgcctcttgttgtgcatgctagaaccatctactacccatcccgtgcccagtatcctttatctaaagaagcggaacagggaattgagccggtgtttacgagcctgctcaaccgtggtgcaatagttccgtgtccgagctctccagtaaacaccccgatacttcctatcaaaaaaccggacggtacgtaccgcttcgtgcaagaccttcgtattgtaaacgacgcgatccatagtcgtcaccccatcgtgccaaatccgtgcactattctcagctcattgcccgctactgcgacatggtttactgtcatagatattaaaaacgcgtacttttccattaaggtcgatccggcatcgcagttctggttcagttttacgtttaaaaatgaacgttttacctgggctcgtttacccatggggtactccgaatcgcctagtgtctataacgaggccatggtcgcgtgcttgagaaatttcacaagccctgctggtagcacagtaatttcttatgttgatgacatcctgatcggctcaccatccaaagaggcctgtaagatagacacggttgccttacttacatatctcgcttccgttggcttaaaagtgtccaaacataagctgcagctgtgccaggaaaaggttaagtatcttggtcacattcttagtccaggcaatcgggctctggatgcaacccgtatcaccgctattaccgcttgtccgcggccgcgtacgaaacagcaggtgttacgattcctgggaatgactggttattgccgagcatggattcttaactattcagaaattgcgcagcccttacaactgtgcgctacagcctgtaaaaatctgacagatgttgtaacttggacggatgactgtgagacagcctttcgcaaactgaagcaggcgctggcaagcgcaccggcgttgggcttgccaaattatgatctggattttcatcttttcgtttgtgagaaaggtggttatatgagcggagtgttatgtcaactgcatggtgggaaacacagacctgttgcttacctgtctaagcgtcttgatcctgtagcccgcggctgggttccatgcctgaaaagtgtcgcagctgcgtcaagcgcagtattagcgtgtgcagatcttgtactgctgcacccgttgacggtgcatgtgcctcatgatgtccacgccctgctgatgcaggccaaaacaacccatctgacaactgctcggctgctgtcatatcagcatgttctcctcgcactcagccatgtcaaacttgttcgctgctcattgctgaacccgtcgacgctgcttcctaccgaggaagacggcgaatcccacgattgctgtgatgttattactatctgtacaaaaccacgccctgacatatctgaagaaccgttatctaatccggatctgcttttttatgttgacggttcgtgcttacgcttagactccggagaagttggctctgggtatgcggtggtgaatcacattcgggtagtggaatcgtatagtctccattcttcattttctgcacaatcggcagagttagttgccctgattcgcgcgtgcatcctcgccagcgggaaaagtgtgtgcatctacaccgatagccaatactcatgggcagtcgtgcatgatcatggcgctatatggaaagaacgcggctttttaaccgcggccgggaaacccattcaacacaaggatctgatcgaactgttgctcaaagccatacagttgccaacggccgtcgcagtggtcaagtgtgcagcgcataccaaaaataacgacgaggtatctttggggaatgcacgagcggatgcggcagccaaaagtgcagccaagggtggagtaagaaattaa

SEQ ID NO: 371 - DNA, 2004 bp, synthetic construct
  source 1..2004: mol_type = other DNA
atggctagcgcatggagtcatcctcaattcgaaaaatccggattcaactcagatctggggaccgatattcttacccaggtgccagatcagttatggagcagacacgagactgatgtgggcttagcggtttctgcttcaccagttgtggttaaacttaaacctggcgccgtcttaccctggcgtcctcagtataagctgaatccggccgatgaggaaggcatagcgaatcttatagatggtttttcaaaggctggggtgttagttgaaatcagctcgccgtgcaatacacctatccttgcggttttgaaagcagacaaaagtaagtatcgattagtccatgatcttagagcaattaatgctattctcgaagaggtagctgccgacttcgctaatccgcatacgctgctcaacgcaatacctactaaggcaaagttttttaccgttattgatctgtgtagcgcttttttttcaattcccttagccgaagagtcccggtatctgttctcctttacgtttcgcggccgtcagtacagctatgcccgcatgccgcagggtctgaccagctctccggcgtggtttgatcgtgttgtcagccaggatctgcaggaattggatctgagtggtgtcatcatacgatacgtggacgatgtcctggtatgcagcgatactattgaggactgccaacgggatagtatcaaagttttgcagcgtctcgcagaatgtggtcacaaagcctcgagaaccaaacttcagttctgccagccgcaagtagaattcttggggcgtgtaatttctcacggaacaattgctttatcgcctgatcatctgaaaggcatctcacgtgcgccacggcctcaaacctgcgcccagttaacgaccttcctgggaatgactggcttctctgccgaatggctcgaggactatgccgtcaagacagccccactgcgcgaccttctgaaaagttccgaagacaaaaccttaaaaaaaagtcttgagtggaccacagaagctttgatggcgtttgacgtattgaaacaagaattacaaagtgcaccggcgctgaaaatgccagactacgacaaaacgtttcatctttatgtttcaaaccgttgtaacatgtacgctgccgccgtgttaacacaagatagctgttccgggggccgtaaacagcctatagcatattactctgcaagattagatgacgttgcacggggctggccgccgtgctatcagggtttagctgcggtgcacatggcgtacgaaaaagcgtcggccattacgaaaagttatccagtggttatctacactcatcacaagattacagagctgatcaaccattctaaactggtgctgaccacggctcgatgcttgcaatatctcccgttgctcacctatcccgatgtaacaattaagcgctgtgagactactaatccagcaaatatgctgccgttcgagtttgaaggtgaaacacacgaatgcgtcgcggaaaccactcgctatacaaaacttcgcccagacctggaatcagaaccgttagatgacgcacaggtgatctattttgttgatggatcctgctttcgtgatcatatgggtacgcatgccggttatgcggttgtacaacataaagaaggtacttttgtgacggtgaaagctgagaaatgtctccagccctgctctgcacagctggcagagctgtatgggttaaccgccgcctgtgaactggcgaaaaatctttccgcgaacatctacacagatagtgcttatgcgcatggtgtatgtcacctgtttggagcagtttggaagctgcgcggattccagaaaagcgatggcaaaccggtgcgccatggcaaacagattatgaaactgatatcggcgatgatgctgccccatcggttggcaattattaagtgtcctgctcatcaaaaggataactcctctacgacaatgggtaataatgcagcggatgaagccgcaaagtgtgcatcaggatgtaaagtcgcttaa

SEQ ID NO: 372 - DNA, 1980 bp, synthetic construct
  source 1..1980: mol_type = other DNA
atggctagcgcatggagtcatcctcaattcgaaaaatccggagcggccctgcctgagctgacggatgtagatccgagactctgggcagaacacaaagacgatgcgggtttcatcgacgtaccgccgtatgtggctaatttgctgaaagacacacctgtatactgcaaacagtacccactgtcgaaagaaaaagaagatggcatacgcccggtgatcaaacagttactcgcccagggtatcctgatccacacacactccccgtataacacgcccataaaccccattaagaaagccaacggatcatggagactcacgcaggatctgactaagattaatgagctgattaaaccgcttgcgcctattgtcccagatgtccatacgatacttaactcgatccctgcaagccatgcatatttcactgtaattgatatttgtagtgcattcttttcggttcctgttgatcccgttacacagccactttttgcttttacctttgaccatgctcagttaacatggacccgcttaccccaagggttttcagatagccctgccgtttttagtgccctcgttcacgcaacattgatggacgccaaactgccgccggacacttgtttgctgcagtacgctgatgacatactggttaccggcgcatcggaagatctgtgcactgcggcgagcactatcgtatgtaatattcttgcggaagctggctttaaagcgtcgaaagataagattcagtgggtcaaacgtaaagtggagtatctgggacatgaattgtctcagggtaccgtccgcttatctgcagaccggatcaaagcaattgccacttataaacacccgtctaccaaaaagcagatgcaaagttttctgggcctggttaattactgtcgttcatgggttcccaattgtagtatgtatgataagatacttagagctgctaccttacaggattccgacgaaattacatggacagcggagatggatcaggcttttacgtatcttaaaacctcattaatccgaccgccggcattaggtctgccagtatatagtcaggagttccatttgtatgtccatgaggacgggggtacggccgccgcaatattggctcaagaacatggcgggaattttcgtccagtcgcatatctgtctaaaaccctcgattccgttgctaaagggttgccagcctgtttacgggcagtggccgcggccgcgatcatggtccaagatgccgagcgtattgttttatctcacccgctggtcgttcatactaaccaccaagtgggagttatcatgcggaatattagcacgcagcacatgacagcgcagcgtcgatctggttatgaagccattctgcttgccaccgcaaaccttactctgaagccgacctcagtggttcactcacctacgctgtgtttacataagctgttaacacagggcgattttgaggatgatgatcacgactgcctggctcgcatacaaataagcaccgcatgccgtcctgatgtatcaacttccgtgctcgaggaaggtaatcattggtatgtggacggatcttgcttcaaacccaatgataacgaatacctgtgcggttattccatcgtggaattgccggatcgtattattgaggcgtactccttgccatataagtcagcgcaagtagcagaactgattgcattaacccgggcgtgtcaacttgcgaaaggccagtgcattaatatctacacggacagcaagtacgcccatggtattgtgcatgattttgccaaactttgggaagaacgcgatttcaaaacaagtgaaggcaaacctatcagtcatcatagcgttgtggccgaattaatacatgcagcacaactgccaagcaagcttagtgtgattaaagtggcggggcatgtcgcaggtgaaagcgaggaagcgaaaggaaatcgcctcgctgatgaagtagctaagtgggctgctaaagacgttatcctgtcttaa

SEQ ID NO: 373 - DNA, 1998 bp, synthetic construct
  source 1..1998: mol_type = other DNA
atggctagcgcatggagtcatcctcaattcgaaaaatccggaaacactgatcaccctgcactgtcgcatattcttgcgggattaccagacactttatggtcgcaggggagtgccgatgttggtttggtacattgtccgcccatctacatacccctcaaaccgggctaccaacccatctggaagtaccaatatccactcaacaaagaaaaaatcgagggtatctcgggaactatcaaaggtttgcttgaagcaggcgtgttacgtgaaaccgaatctctttggaatacgccgattctgccgaccccaaaaccgggcaagagagactatagactcgttcacgacctgcgtccgataaaccaagcaaccgcgacgaccacgtggtccacgccaaacccgtatacaatgctggcagccctgtctcctacacataattggttttcttgtgtagacataagtaatgcattcttttcctgtccgctgcacccggactctcaggatatgtttgcgtttacgtatgaaggtcaacagtatacttatactcgtctgcctcagggcttcacagaatcaccagccctgttcaataagattctgcgagatcagttacaatccttacccattcctcaggatgttgtactgctgcagtttgtggacgatatctgtttggcagcggagtcagaagcctcaattattcatgccacaaagatccttctggaacggctgtttgatctgggctataaacttagcaaagaaaaattacagttaggtcgccggcgcgtcacctttctgggtcgtgtggtcgctgctggctgcactagtattaccccgtcccaccgcacggatattctgagtcatcctaaaccaaccactgtcaagggtatgatggctttcttaggtttgacagggtattctcgtcagtatatacccgactatgcggcgctgaccgcgccattacggttactgattaccacggctgggcatgcaaatcttaaagcgcccctggtttggacgacggatgcagatcaggcctttatcaccgttaaacagctcttgagcgcagctacagtcctggcgccgcctgattacactcagccgttccaccttgatgtttcggaaaaagaggggtttgtgaacgctgcactgtttcaaaaaggcggtgggggagagcggcacgtcttaatgtattacagttccaaacttgataacattgagattggtcatccagtttgcacaaaacatgtagcagcaattgctaaagctctcgaaaaaaccagccatctgacaatgtgccaccaaaccatagtgcatacaatccatggagttgctgcgttcctcaacagttcggccttttccctgagccatcgcagaacagatcgaattaaggacctggttttacagtctcatattacattcacgggcgaaggagtcaatatggcagaaaacatgtcaattggtgaggcgcataattgtgtgaaagataccgagactcagatgcgcgtaactcctacgctctctagcgttccgttgtctaatcctgatcttgtgttgtattgtgacggatgctgttatcgtaaaaactcaggcgaattaatcgccagtttagccgtggtgtcagggaagatagggaataatttgacaaccgttaaagctgagatcgtgcctcaaccagcaagcgcccagaaggccgagattgcggcactgacagaagcatgccgctacgctgaaggcaaaacggtcaatatctacaccgatagcgcgtacgcccatcaggccatacatgtagacattccgcactggctgcgtaaggggtttgtcaccagcactggtatgttaattaagcaccttaaagaaatgactgatcttgtagaggccgtgcaactgccgaccaaggttgctattttgaaatgcaaaggtcaccagaaatcaaataccgaaatagcgaaaggcaatgaagccgccgatcatgcggcgaaaactacagctggctattatgatcagtaa

SEQ ID NO: 374 - DNA, 3987 bp, synthetic construct
  source 1..3987: mol_type = other DNA
atgatgtatacaactaagtcaattctgtgccgacgtctccctcgtcttagacaagctgagaaccaggtgagcagcgcttgccgcgtgcgaactgaaaaggggatcacattacttgaaggggtacacgaggccatcctcgagaactcctcgacgcgatgcggaagtggtgtaactaagcaacccgtcgccaccttagaaaagggttgttcgactacgttgacttggcgccacttagacatcttgattgccgggatgggatggaagaacgacagcgaagtttgcgtacgcacggcgaaacgaagagccacgaagtcctcagaggtatcagtccatcaggggacctgttgcgtcgacactggggactttacagacctgaccgacaaccttagttttgttgagagtaatgacggtgacgagccgagtataggtggacaagatgagccgaatgaagaggagacttccttagaagcgggtggtgaaatcgagggtacacacgcgaactttctgggcgaggccaccctggaagtggaagagatacaagcactggaagaccctcagccgaacttggaaatacaagaacaagccgagatgccgaaccaggaaatccaagctcaagtggatgagcttcctgaccaagaaaatcaaggtgaagtgaacctgcgcggtcggccaattgtcgacggcaataagatctattacgaatacaacagtgaatcgggcggcgcgtgggaatgcggtcaatgccctgaagcgttccctgacgtgaagaagctcgaaagccattaccggggcactcacctggactgcgtggtgaagtttaactgcagcaaatgtggccgtaactttgttgcaaacggtattcttatccactaccgtaagtggtgcaaggggcgcccgatacgagtcgaccctgatcgcaatcctcatcaatgctcggaatgcgactactcagcagcgtcaaagcgcggcttgtctcaacacgagcgccaccggcaccctgaactgcgcaatttaaagcggattgcgcaacgtggcgaggacgcgcgtcgcaagcgaacagctcgtaagctgatccgtcccccaggtcgcggcggcaaattgtggagcgctgaagaggatgacattctggagcgcttatgtatagttcaccaggggacacgccttatcaacatggcgatcgcagggacgggccttcttcctggtaaaaccaacttacatataggggaacgtcgtcgacaatggaaggaaatgaaagcaaaacaggtagaggaagggttaagcgaggctatggctaatatatcattggagccgcctgtgttgcctacgcaacgctgtctgactgagctggaaacgtatttagaggacgtgaaggggatagcagtgaagagcgacattgggaccactttatgggcttgccttaacgaccatgtgaatggacaggcgttacaaagtgagcagatcgacgagattactaagaagatcgttatagagttgggtaaggccaacccccgcgctaagcgtacagggaaaacaaatcgcaagaaaggtaagaaggccaacaacggggcgacggagtttagccggattcaacgcctgtttgcaactcggagaaaagtgcttgtcaaggagttgttggacggcaagcgtgatgctgactgtcctcttgacgttaaggtagttgagcaaacgtaccaagggagatttggtggagagtcaaagattgtgaacctgcagggcttccctgcgccagaatctcttgcggacaactccgagctgttacgccctattaaccgtttagaagtgagacaagctctcggcggaatgaagaatgacagtgccacaggccccgacggcgttaaggtgctgcctgtgaagaatcttgagaacagaactggtacgatatcactgatacttaacgcgtggttgtactcagggatcgttcccaaaggaacgaaggccaaccgatctatcctgctccctaagacggaagagggattggaagacgttggcaactggcggccgttaacaatttctagcgtggtgctccgctgctacactaagatattggcaaagcggcttcttaaggctcttccactgaacgagagacaaaagggattcagacaacttccagggtgttctgagaacgttaccctggtgaatgaggtaatatccatggccaagcaagacagcaaggagctggctatcgttttcctcgacctcgctaaagcattcgacaccgtgagtcacgatcacttagttaagagccttaagcggttcggagtggacatgaagttcatcgatattgttgtgcaactctacgctgaggcgtctactagtttcactgttgggttaaagatgaccgacataatcctcatgctttgcggtgtgaagcaaggggaccctctgtccccgatcttgttcctggcgtgcatggacccgctgatgtgcagtctggaaacccgtggagctgggttattattggcccacggagtgaccgttaccacaatggcgtacgccgacgatactgcggtggtggccgggtcgaaggcaggtatggagaagaatctggaactcgtgaaggaattctgcttagaaactggtttaaagttaaatgtcaagaagtccgtgggtttccacttaagaccaatcggcaagtcttatacggttaacgagggctcccaattcgagtgtggcggtgaggcattcccttgggtaatgccaggttctgtcactaagtacctgggcgccaagtttgacccgtggcgtggtatcccagtggttgacccttgtaagaagctggaaggatgggcgcaacggatccacagagcaccgttgaagccgcggcagaaggtgtctttattgagtgactacgcctgtgcccgcctgatgtatcacatgtccacggctactcctagccgcgggagattagacaaccttgacagcatcgtcagatactgggtcaagcgttggctgaagctgagtgactctactaacacacacttcttttacaccggctggaaggaaggcggactggggatctccaagtttgcggcgtcggttccacatatgatcgtaggcaagttcgaagcggttctccgctccaaggacccagttctggtaacactctcgggaataagaaatcttcgccagcgtgtggataaaataaaagagaaataccatgtttgcggtctgaaaacggacactcaaaaggctagctggcgtgaagaagagagtaagagttgggctaaacttattagccaagggaagggcgttgaatgcatggcaggcaaccctcagtcgaatacatggattaacggagagagcttcatgactgagtccgagtatatcgccgcactgcaactgcgcactaacacatacccgactcgcgagtgtactaaccggggccgtgccggagcgaacattatgtgtcgccggtgtgggttagcggttgagacgatcggtcatatctcgggttggtgtctggaagttaaggataaccgcatagcccgccacaaccggatcgtttacaaggtcaaggccatggcggagaagaagggcttcagaacgctgcttgagccaaaagtcaaggtagacgggcgcacgcttgtccctgatctcatcatatacgacggagcttcacaaaaggcaatagtcattgacccaaccgtcgtttgggacgacagcggtactgcgctcgacgacgcggcaagaagaaaagtagagaaatacacatgcattatacccgccgtcaagaccctgacaggttgcaaggaagtccgtattcaggctttagttatgggttgtcgtgggagttggcacggtggtaacgacggcttggtccaaccactgggatggaagcgccatgatattaagaatctctgtttattaacactttgcggcacacttaagctgatccgttacttcatggacaagtacccatacgatgttccagattacgctctcgagcaccaccaccaccaccactga

SEQ ID NO: 375 - DNA, 3414 bp, synthetic construct
  source 1..3414: mol_type = other DNA
atgtctcattccacagcagcagcttcttcgggcgcagctacaggtccaatagtcatcagatacccggttaatacgactaacggtggaaccacgggtgagcaagcctgcttcttcgctgaatcatcaaattgcggtcttgcatttgttgacaacaagtccttcgtggatcacttattgcgggcacacaaggctacgcgtgaccaaattcaatacatttgctcccactgtcaccggcaatttgagaaaatagagtcagtgcggtcccatcacaatatctgcaagcggaaggaagcggtcgctccagaccttgatgcaagacttcccgtagagtgcgaggtagacggatgttcacgaagattcacgacgacatctggaatgcgcctgcatgttaagaaggcacaccccattgagtaccacgcaagcataccacaatccaagcgcaacctgtggtctgagggcgaaatgcgcatgttagctcgtatggaactggataacccgggactgactaacgcgcgtatgaacgagttactgcacagtctgcacccttcacgaagcgtcgacgtgatccgtcacatgcggggccggaacacacgctaccgcgaaatcatggaagaactggttctgataggtgttccagaagatagtgacagccaagcggagaagaccgccgagccggagcctgaaggtcggattaacgagtgtcaattagaggaactggtcaagactcacagccaaatcgacgatgcgcggtaccaagctagcattgaatacgtgcgtcgtgtactgcgctcagacgacccaggtgaattcttcaacgattggttgttctcgtgcttcccgggcaaagagggacgccgtattcagagacgtaaacgcgaaagacttccaccgcgtaacgccaaacaaaagcgcgccgctgaattccgggtgctgcaggagctttggcgcaaggaccgttcccgcctcgcaacggtgattttggataagatgcccccgactgcgaaagagcccccaattggcgatatagagaaggtttatacgactagattcgagcgtcctagcccggaagaccaacatgaattcacctctaagccgattgaagaaccaatggagatggtccggtttataacggtggaagaggttctgaagaacttaaaagcgatgaagagcaataacgcaccaggtttagactcgaacatcaccatgaaacgcttgcgttcgctcccgctgccttgccttcagctcgttttcaactgttggctggctattggtaaggcaccccaatccatgaagcagtgcagaagcaaattattgccgaagggagcagagggtctggacgacgtcaataactggcgacccctgacaatcggttctctgctgatccgtttatacactagaatcttagctatgcgtttgcaatctaaggtacaattgcacccgcgccagaaagcgttccaacccttggatggatgcggtgagaatattgcaatagtcagttcgttattacaagacgctcacgagcgcaagaaggagttgaacatcattttcctggatatagccaaggcatttgactgtgtctcccatcattctatccagcgtgccctgaaccggtttggattgccccgcgcgtttcgtagagttatagaagacttatacgatggcgccacgactgtgttccaaacgtccgagggtgatagtaaaacattggggatttcaagtggtgttaagcaaggctgcccattgagcccggtcttgttcaatatggtcatggatgagttgatagctgacgcgcccagcaccgagtggggctacgagcttcatgacgaaagtgtaggcttgcttgccttcgctgacgacattgcactcgtttcacacagtcgtgccatgatgagccatgcattggactatgccgccggtttcttcgagaaaagaaaccttcaactgaatgcccgaaagtgtatagggctgtccattaagaaagcacctcgcagaaaagtaatgcggatagagatggggtccatttggtcccttcggaacggtagtgacaatatccctattaagatgttatccccagccgacatggcaagatacttaggtgcgctgttttcgccttccggcaaacaaacgatagacttggccaccatgaaaggttggatcactagtatcgaaaagtcccggctcaagccgcaccagaagttggtgatgttacgcacatatctgttaccacgcgtcctgcaccaccttacgataggggagcccaacgccacaacattaagacgggtggaaagagagctgcggaacagcgttaagcgattcctgaagctgccggtcgctactgcaacacctttcttccatatttcaacaaaagaaggcgggctcgaactgccaccattgcttgagacgatcgccaaaagaaagttgaaatgggagatccgattacaaaagtcaaaggactctcttatacgcgcagtggccgattcccctaaattccggaagcaattcgataaggcacgggcctggattggcgtgccggttatcaatagacctagcgacatcaaccgcagaattcgtgagctcaacaatggccgtttcgaacgctttactagcgagctcgcggtacagagccggtgccaccgagcactcgcaagcaaccctcttagaaacgactggttgaccgggcacaacccggggttgtacgcctcacagttcatcgacgccttaaagttggtcacttcgcagctgccgacacgagaggcactcaacagaggtaatccacaagcggataaacgttgtcgcggatgcgggttctcagttgagaaccaaaagcacgtcataagtaattgccctctggttcaacaagaacgtcatctgcgtcacaaccgtgtagcgcagttattcgctcgctatgctaaggaaaaggggtggaacataattgcggagcccagaatacgcaacccatccggcgagatcatgcgtcctgacatcgtgttacgacgggacgacaacgtagctattgtagacattcaaattccttacgaggatggtggtcgggagcaattggcggaacgctaccgccagaaatgtagtaagtaccgccaattgtctacgcatattcagcacgttttaggggttaccaatcacactataggcgcaattatcgtcggggcatgcggcacctggtgcgagttaaacaacccgatcctcgactacataggcgtgaacaccaccgcgatcaagaagaacctttcgatagaagcactgcgcgggacactcaaaatctttggacaattcaagaaccgtgttttccggaacgaacgtgtacacccatcccaacgccctagctcaggaccgccggttccgtacccatacgatgttccagattacgctctcgagcaccaccaccaccaccactga

SEQ ID NO: 376 - DNA, 3717 bp, synthetic construct
  source 1..3717: mol_type = other DNA
atggttacaatctacacagaatttaaaaccgatccgggtgctggtgcccgcgtggtagcacttcgggttgatgccggagcgaaggcgggctacgtaatactgcgttctgagggcgttcatgggcacggctactcaggctccggttcccgagatcgagctctcagtgcggcaggaaagattgacgagcctatggaaacgctcgatcgcaagtcttccttccgccttccctttaagatcttgattttcgagagtggccgccgcgagatggacggagaattaagcccgtctctggatttcgtgaatcgcgctctggacgtccaagaatcgcgtgaagaagaggctctgacgttgggttccgaagagccgacggaaccattgtccaacgggagtgtttacatgcctgctagtagcacggaaagaggaattgccgatttggcagaggacgggcaaacaggtaaattgttaattcccatgcccctgcgcacagttgcatgtccctgcaaccaggtattctgcaacgtatatgagtttgagattcacatggagcgagcccatatgggcatagatgtgaagtatacttgtgatctgtgtggcaaacattgtcttcgggttcacggcgccaaaatacacagatcgctctgtagaggaaacacaatccggccggtaatacctagaccttggaagtgtgaggcgtgcgaggaagcgttccgtagtaagagcggtcttagccaacacaagcgccatcgtcatccggcgttgcgtaacttagagcgaaaagcgaagtacgtgaaggagccgggccaggctaagcccctgtttaaagcaactaaattatggtctattgaagaaactaagcgcctgttggagctggagaatgagttccaaggtaataagaatatcaacaagttgatagctgcgcagctcgccggtaagagcaacaagcaggtatccgaccggcggcgcaccgtgcacaaggctaaaactaatattagccaagacaagggtgttacagccggcagaaacgaggatcgtgtaacgggacctggcatggcagtttctgagacggttaccgaccccgaagctttctgggactttgtgacgggcgcgcgtaactcgggtgtcgaaggggagtcgcaccaaaagactctgcaggtccttgtcgacctgctgcaggaaggcaacgtagaacgggcatgtagtcaagtctctgagattctggctgatatcacacccgtaactaagccccaaagtaagtcaaagaaaggccagggtcctaagaacagacgcaagtcacaggcgaaggcagaagcatatcgtcacgcccagcaactgttcgaaaccaacaagaagtctctggtcgcagaactgctcgaaggggctgagtcgaccaagtgtccattatcggttgaaaccgtatacgaggcctataaagcacgtttcgagactgagtcgccagaggtagacatgtctcatttcccgcccccggtgaacggaatggactgtgacaacatactgaagccaatcacgggcgaagaggtgtacaaagcagttcgcaagactcgcccggatagcgccagcggaccggacaagatagacgttcgttccatacgaaaatgggacccgcgtggcataaaattggctgcagttttcaatatatttctgttaacgggcaaggtaccagacgccgttcggccaaatagatcaatactgctgtacaagggcggtgaaaccacgcaagtgggcaactggcgccctttgaccattgggtgtatggtgttaagactctacaccaaggtcctcgccgcacgttttatgtttgcgaccccgatttccccttgccagcgcggctttgtcagcggcggtagttgtaacgagaatgtacatttagtcgaggggcttgttagagacgctaagagaagaaacaagcctataggtgtgtgtttcctggatttagccaaggctttcgacacggtgagccacaagcacgttctggcagggttaacgcgattcggagcctctaagcacgttacgcggattgttgaggatctgtacagaggtgctagcactagatttaccattcctgacggaaccaccggagagatcgagatgaagcgcggcgtaaagcaaggtgacccgctgagtccagtactgtttaatattgcgttggaccccctgttttgtctggttgaaaaggcaggcgtgccgtacgaactcgaggacggaacgcctgtgagtgtagctggttacgccgacgacacgatggtggtcagtaacaacaagaacgatctccaagcgaacattaacttagtggaagagttctgccgagctgcgaagttaaagttgaacgccaagaaaagctacgcatacacgatccgtccaatcgccaaaacttacgttgtaaattgcggggatcaattaagaattgaggctgaggcgataacgtggatcgagccgggagacaccgcaaagtacttaggagtcgaacaatccccgtggatccgaaaggtgaaggataatcccactgaggatttgaagtcatggtgttctaaactcgggcgggctccattaaagggtcggcagaagttgttacttttgagtagacacgttctgcccaagttgaagtaccgcctggctaattcggacccttcaaaagaggtattggctggcttagactccgtctcgcgtgaatacacgaagcgctggatgaaccttccggcttgtgtctcctctgcctttctccactgttcggtccaagacggcggtgtgggtcttccgagcttagcgacagaagtaccacttgacaagataggcagcatgtcacgcttaatagggtcacaggacggacacgtaaaacggctggccaaggccatcggtatcgaggaacagcttgaaacgacctgccggcgttgggagatacgacgtccgctgaacaagatgcgctgtgtcgtgaacgaaattagaaagagacgtcgggttgaatgggagaacctggggtcacaaggaccccgaggcccctactggagaagatgccgtgcatcaaatggttggatgcgtcgtgacgtgcttagcgaaggtgaacatacggtggcgctgcaattgcgtacaaacacataccccacacgtgaggcgatgtcaagaggtagaaagggcactaacgtcatgtgtcgtcgctgtgggcaaagcgtggaaaccctgggacacatcactggccaatgcttagctgttaagggtaaccgtattaaacggcataacaaggtatgtggaatactggtttcggcggcacaatcgcaaagttgggaagtcatgatcgaaccacacttcaaggtcgaagacaagacttatataccagacctcgtattcctgcgtggagaacaggcagtgatcgttgacccgacggttgtttgggagagcaattcaaacagcctcagcgaggccgcacgcaagaaggtggtgaagtataaccccatcttaaagacggtcaaagatttaacgggaaaatcatcagtgctcttgtttggtttcccggtaggtgggcgcggtacgtggtgtcgtggaaataacaaggttttagacgcactcgggataccacgaagcaaagcgcaatatatttgtttaacagttttaggcgacactttgagaatgcttcgagtctttatggacaagtacccatacgatgttccagattacgctctcgagcaccaccaccaccaccactga

SEQ ID NO: 377 - DNA, 4119 bp, synthetic construct
  source 1..4119: mol_type = other DNA
atggccgagcgcaattgttcagcaacttacattgagggtgcaactgctcctagtagtgcaagttcaggcgttggcgccggtgatgactgccccgaagtagtggacccgccaggtaccgctacttgtgaagtctgtgacgcgaagtacagaactggccgcggcctgtcactccaccaacgttcgcgccatccagaatggtatcattctcgcaaaggccccgccttcgttcgcccgggttggacacgggaagaaatggtcttgcttgttcgaggagaggtccggttggttagagctgcgcggcgtagaggcgaagagggacgggtgaaagtgaacgcggagttatgtagacaatttcccggtaagaagcgggacagcatagtaaatgttcgtaagactaagaattatcgcgatctgcgtgctcggcttgagattgagcttgaggaagaaagtgacgaggaagtggagcgggtggtaccggcgccagaagtgggactggtcccagtggagatgcgcgaaggcggaggaggcggagaggtaggcttagtagcctcaggcggtggtggtgacctgagtccaacaccgtcgcaagtggagagaaagtgggtaacgcccgtaccgaaggaccgtaagggaccgaagttacgttggggagaggaattacttgaagaggtagcgcgggaagagcttcgtctgtcggggttgaacacccgtttcatgaacgcagctctccgtaactccttcccgagcagaactttggaagccatcaaagggatgagacgaaagccgaagtacaagttgctcctcgcgtccttgtgcgcgccgaatccagcagtaacgccaccaggaccatctcaatcagaagagggtaccatgctcccagaggtcgaaggctctggtgaggggtgcagtcccgaacgcgaatttgtaacgccaactgtatcggtgaattttaccggtcctctgcaaccgactttcgtcgagggaataagtccgcccagcgttatacgtctccctgtagcatctgatcccccgaaaggcggccgacccgaaatagttagtgatgagtgcaatgtcacggggttggtgcacatggactctgtagaccacgattgtacgttggttcccaccgaaagtactataggcgacatcactctttgcgatcatagcgtcgtcgagatagactccctgctggtggatactccccctcgccgacgtgagggagaggttattgaatcaactgttcgggacgatcgtcgaggcgatgagggcggcgaagtcagattacctaccgagcctgacgaagactcggaaagtgagtcagaaccaagcagccaaccctgtaacccccgccaaggtgacgtgtcccagacagtcggcgagggcggtggtcgcactgtagcgggtcgagagccaatggattacgaaacttgggaagcagagttgcgtgaggagttggtctgcgcacagggatttcttgccggtatggactccctggagttccttgacttccaacccgggcagctgagccgagagcacagagagatgttagactcagagtatcagcgatgggtcgaactggaactgggatcatcacatcgacgtaaaggcccacgtcgtcgtgcgagaagaagagaagcggccggaagaaaagaggcggccgggccagctgaggccggcggtcgccgtaaacgtcgtcggactgagtacgccagagtgcagaagctgtaccgatctaaccgcggggaatgttcccggaaggtattgtcaggagagtggagatctgaggagacgccctctattccactggaagaccaagttgtgttctggtcacgggttttcggagaggagagcgtgcccgacactcgtacgggatctccgcagggtatggtactgtggggtttagtcgagcccattacggtcgaggaaatcttcagcactttgcgtaagacgaaggatggtgctgtcggtttagacaagatttctcggaaagaaatatcgaagcttaaccctcgcgcgctccaagcacacttcaacttgtggctttacgcaggttatcaaccgattgaattccgtcgatcgcggactgtcctcataccaaaggtacaagagccgtctggtcctggccaattccggccgatcgctatcggtagcttcattagtcgtgtctttcaccgcttattagcggaacggttgagtggtttattggaattccaatcgcgacagcgtgcgttcgtcaagggcgacggtattgccgacaatgtcttcttgctgcgttgccttctgcgcgacacttgtgtcgaccttaaaccgatgtgtttggcgttccttgacgtttccaaggcattcgacagcgtgtcccacgcaactcttctgcttgcagctgagcgaatgggtgcgccgggccctttcatatcatacctgagaaccttatactcagaggcgtctactgtgttgcacgttgacggacggtttagcgactctctcaaacaaaaccggggcgtccggcaaggggaccctttgtcccccttactcttcaattgtgttatcgattgggcgttagcgtcgttagacacagaaatgggtaaggtcgtcggggggggtccacgactgaaccacttagctttcgcagacgacgttgttataatcgccgaatctgtagtcggtttgcagcacctgtgcggccagttcgagcgctcgttaggccgatgtggcctgactctgaacgtggagaaaagtcgtacgttgcgtattgcagtagacggcaaagctaagcgatgggtctgtgagccgacaccatttgtctcgttagcgggcggcttaatgcccgccgtgacaattacccaagcttacaagtatcttggggtacacatctctgctcgtgaacgggatgcgacacccgaggagcttttgactagaggcttaaatcaacttaaagcggccccgttgaaaccccagcagcggatgtacatgcttcggactcatctgttaccaaagttacatcacaagttggtactgagccgctcacgaggcggggttttgaaccggctcgatcgcttagtaagaaagtccgtgagaagctggctggcgttaccccacgatacgactaacgtgttcatacactgcgattcccggcacggtggtctgggcattccggctctccgccttacaatcccattgatgaaaagtgcacgccttcgtcggctggccgccttgcgggaccctgtatttgtagcattaatcgccagctcgcgaaccttcgctgaagaggttcgccgttgcggagagccagtgaaaataggtgactcgacagtaacgtcagctccagctgtcaaggaagccctggcggagcaattgtactcctcagcagacggctatggcctgcgctctagcgctggcgttccatacgtgcacagctgggtatcagatggcacagcgctgatgagcggatcagcgtacatacatgcgatccaagtgcggggtgcaacgctggctactaagaaaagagcggccagaggtagaccagacgcgaatactgcatgcgagtgctgtggacgcacagagactttgggccacgttttgcaagtctgtcaccgtacctggggctcccgtatcaagcgccacgacgcgcttatggaaaagttccttcacagtttggagatacgcggtggttccatacttcgggcgcccgtcatccctgtagttggcggatcaccacaaaagcctgacggtgttatctatttccaaagccactgttgggtcgtggatgccagcgtagttgcggacaatgcggacctggacaacgcccacttaagtaaatgcgcgaagtacgatacacccgcggttcgtgattggtgtcaattaaactggccgtcacacgaaggagtgcgaggatcaatacgattcggtgcactgatctttaactggcgtggtgtgatgagccgcagatctgcccgcatgtgtgacgagctcaaggtaccacgtgccactgtcaagctgttcgcggtaggagttgttgaggcaggctggcgtatgtttcgcgagttccaccgctcgactgcgcaatggtacccatacgatgttccagattacgctctcgagcaccaccaccaccaccactga

SEQ ID NO: 378 - DNA, 3381 bp, synthetic construct
  source 1..3381: mol_type = other DNA
atgcctgccggcacttccccacccgttagatggcaagacaaagagacggtgcccgtgatagctgctgagagcgacggccggtgcctcgattgtgggaaacaattcaagggccaacgaggcttgtcattgcatagtcgctccgcccacccagagctgtatcacaagaagggctccgcggaaatagcacagactatacgtgaacaaacacggacgcgctgggacggagaagagtctgcggttatggcccatgaagaggtacgactcctgcgccaaggctgcatggagttgaataaagagctgagcaagttcatgacaggccgctccttccatagcgtgaagtcccatcggcgtcaacagtcataccgcgcgctcgtgaaagcatacgtgccgacaactggtggattgggcgtaaaagaggtcgccatcccgcctcgtaagacgaccagagtagtcggggaaatggcaccccggccgcatgctgatccacgtgaagatgaggtcgggcagcctctgcagcgtccggctgctagagttgctgaggcttgcccacctcgtttacatagcccaccgcaacaaagtactaaccagccaccggcggaagcggcagaggtggcgttcccatggccaaatccacttgatgaacacgaagttgaacttccggaaaccgtaggtattgacacacctacccgggcgaaggtagcgccaacacaagagcaggaaattcacgcgggcgacgagttcgactggcgaacaccaatacgccaaaccataatcgacttagcaactggtattaatatacaacctgagttacttcagagcagtacccagaacccgcccgccgactctggtagactccagaacttaatcgatcaagacatcatggagctcctgccgcctgtggttcgaaagggacaaaacatgcgcccaggagttcaacgtcgcgtagcacagagctccagagaaaagcgacgtgccgcatattcacgtacgcaggcactctacaagaaatcacgtacttcctgcgcccgcactgttctcactggcaagtggcgtgaagtcgctcctaacctgagtctgagagaacaagaagcgttctgggcaccgctgttagaaactccttctataccagatcggcgagctcccccaggagacggtgcgccggagtgggatattatggcgcccattacaacggatgaggtcgcaagacacttacgcggtatgaaagatggggccacaggaccggacaatcggacccttaatgatgttcggaagttgggtgtagcagctctggcgtgcagatttaacgtttggatgcttaccggtattgccccagaagctttccgccacggtgttacagtgcttattcccaagacaccagaaggtgctgagcctcacgactaccgccccatcacgataggaccaatacttggccgcgcgttccaccgtatactcgcggaacgtatcgagagacattatagaatttgcggcagacagaaagccttccgcaagggtgacggtataggcgagaatacatttctgttacgaacagtgatcgcagatcggaaggcccgaaatcagtcaactaatgttgcgtttctcgacgtgtctaaagcatttgactcagtatctcacgacagcattttcctggctgcagcctctgccggaattcctgaccccctggttacctacatcaagtctgtgtacgccggcagtcaaacccagctgcgtgtagacggtacattatctagagcaattagtgtgaaccggggtgtcaagcaaggggaccctctgagcccagttttattcaattctgtcatagacttggcgctgcgaaagattgatgacgagatcggtgtcagcattggtactgacaagttgtcttgccttgcattcgcggatgacttagtactgctggcatcaacccctcggggattgcaaagtcaattcaagaacattgaactggcattagggaagagtggcttgaagctgaatgtgaataaatcagctacgattcgcctcgacgtggacgggaagcgtaagacgtgggtatgcaatccgagcgacttcttgcggggccaggacggacaactggttaaggcaatgtcaatcaccgacgggtacaagtatttaggtaacagcgtgtctgctggggtgactctcggttcgacagttcaggacttacaaagaggtgtgcgtgagctgacggcagcgcctttaaagcctcagcaacgtatgtacatactccggaacaacctgatcccttcattacatcacaccgcggtcctgggatgcttgcataagaagtccctgaagttccttgaccagattacgcgtgcagcagcccgagcttggttgcgactgcctaaggacacaccgctcgcattcttccacgcggactaccaagacggcggactcagcatcccaagtctgcgatggaccatccctctgatgaagactaagcggatggcaggcgctgtcgcttctcgagatccgatggtcagagccatcgctcagttacccatatttgccagagagcgtcgtcgttggtcagctccgcttgccgccttcggagtacctataattaacggtgcaggtttgaagagagctatggcggttggacttcacacgagtgtcgatgggcatggtttagcggggagtcgtgtcactgggtatgtgaaccactggatggttagtggaaccgcactgatgagtggcagcggtttcgtcaactgtgttcgtattaaaggaaatttaccatacaccaaggcccgtgcggctcgaggtcgccccgagcggagtgtgaaatgcgacgcctgtcgcggccacgaaacgctgggccacatcttacagacctgtcccagaacccatcaaccccgaaacgacagacacgaccgagttaacaagtacttaacttccactttgggtaaattgggttttaccacccgcgtagaaccggcaattgcaactcctgccggagtacgttacccagaccttattgtgtggaaaggggatacatgcgccgtcatagacacaactatcgtcgcagacaattttgaccccgacgacgcccacgaacgcaaggttgtgtactacgacacaccagctattcgcacgtggtgcgcagacatatcgggagttccagcagataagatcaagttctcggcatgcgttctgacctggcggggtatgccgagtactcgttcagtccgtgagctgcaagccttgggtgtgagtaaagccaactggggcttaatgtccgtcaagacccttgaaggtgctgttgaatcgtacgcgcacttcggtaagagtacggccgggttcagcggctacccatacgatgttccagattacgctctcgagcaccaccaccaccaccactga

SEQ ID NO: 379 - DNA, 3507 bp, synthetic construct
  source 1..3507: mol_type = other DNA
atgcccctcgtaagcgaggtgaatgatggagagtgcgttgaatgtggtaagcaatataagaataaacggggtttagcgatccacgagcgatccgcacacgctgaaatctatcatgcccggtgcgctacgattattgaggagacacatcgcacccaaagaaagagtagatgggacagcgaggagtccgcagtgatggcccgggcggagtcaaagctggttcgacaaggtctgtatgccatcaatcaggcattggtgaaggtcacagccgggcgtacacttgaggcaattaagtcgcatcggaagttgcccgcgtatcgtcagatggttcgttcgtacttgcgtacgacaggtggcttaatcgtcgacgaggcagtggtaccagcacgtattgtggcagaggtaactggcggcgctacgagcggcccccaagacgacaactcgagacaagtcgatgaccgctcatcaccagtggctaccagagtagcagaggtcagatctcccggcccacagcccgcaacactcgcattcgccagtggaccagccggtcctacaggccggtccaatgggcgtaacatgaccgacaatcaaatcacaaccatggcggacgtacaccaagtgcttacaggtcgtattccatcgggagcaatatgtccgccagatggaaagaacaaaagaaatgtcacgccaagaccagaagcacgcgttgcggaaacccgtccattatcgcccataatcacccggtggtcagacgatgagacagatggcgaccccctgcccgaaacgcaaaatgtcaatacgcccgtgagagaagaccgtgagcgtgtcagtcaaggcattgcagagggtatcgtgggtggctacgactggcgtgcacccgtcaagaccgagctgcttaacctcgctattgacgcaaacatatgcccggagctcctgcatgaggttctcctttctccgtgcggcgatagagaattgctgcaagagcttattgacgttgatctgctcggtttctttccgcctgcggagcgtcctcgtcgaaatgtgcggcggcgtcctgagcagcaggcgcctgttacgagtagagccaagcgacgtgctgcatactcccgtgttcaagcattgtacaagaagtcgcgtacctcttgcgcacgaaccatcctcgctgggaaatggagagaagtcgcgcccagcgtggaactgcgcgaacaggtggcgtattggaagacacttttcgaacaagagagccaagaggacagccgtgagccaccagcagaaggtccacctgaatgggaaatcgtgaaccctgtaaccaaggacgaagtggcacgccatatgcggggtttgaaggacggcgcggcgggtccggacggtaaacttcgcaaggacttaaagggtttatccactggcgcccttgccgctcgctttaacctttggctgttggcaggaatggcgcccgacgcttttagagaaggtgtcacggttctcattccaaagtctaatgactcaaccttgccgcaagaccaccgccctatcacactggggccaattctgtgtcgtctttaccacagaattcttgcggagcgtgtggaacgtcattatcggattagcgaacgccagaaggccttccgccgcggagacggtttagcggagaattgttacatcctgagaacagtgatcgatgatcgaaaggcccgttgccaagccaccaacatcgcctttatcgacgtcagtaaggcatttgattctgtgagtcacgagagtattttcctggcagcagccagcgctggcataccagaccctttagtcgattatgttcggtcggtatatggtggtttacgtactcgtattcgagcaaacggggaacttagtgaagtaatcgcggtaaaccgtggagtacgccaaggcgacccgttatccccggtcctgtttaacgccgttatagacttagctctcagacacatagatccagagatcggggtcaaggtagactcggagcgtctgtcatgtttagctttcgcagacgatttagtcctgcttgcaagtacgccccaagggctccaaaagcaattttcaggagtcgagaaagcgttgtgccgctctggcttggctttaaacgttggcaagagtgcgacgttgagattagacgtccacggaaagcgtaaacggtgggcatgcaacccggtaggtttccttaagtgccgtaacggcggaacaatgcgtgctatgtcggtgacggacgggtacatgtacctcggaaataccgtctctgccggcgtggcgtctgagaaatctgtcctgattctcaaggcaggtatctcagaactcacccaggcccctctcaagccccagcaaagaatgtatatcttacgcaacaaccttatccctagtctgatgcacagtgccgttctcggctctatctccaagaaaagcctcaaattcttggatactatgaaccgtgccgcggttcgcagttggttgagattaccccgggataccccttttggatacttccacgccgatttcagagatggtggcttatcagtgactcctctgctgtggacggtgccgctgttacggacgaagcgcatgacaaagcttgtggcatcgcccgatcctgtagcgcgtgccgtcagtcgtttgcctattttcgcacgcgagagaaaccgttggtcccgccctctgagcgcatatggcttacctattcgagacgccgttggtatcaagcgcgctatggcagagggtcttcacactagcgttgacgggcggggcttaaatgggtccttcgcaagtggccacgttaacgcctggatgacaagtgggacggctcgtatgactggatcaggttatgttaattgtattcgcattaagggaaatttaccctacaccaaagcacgcgcagcccgcggtcgtccagagaagcccatccgttgcgacgcatgcaacgaggttgagtcattgggtcatatactccaacgatgctccagaacacaccagcctcgtaacgaccgccacgataagatcaacaaattccttacccaaagtcttaagaaattaggtttccacacacaagtggaaccgccgataccgacgcctcagggtgtccgctaccctgacctggtggcctggcgtgacggtagatgcgtcgtaatagacacgaccgttgttgcagacaacagaaatcctgacgaagcgcacgcgcgtaaggcgacctattatgacaccgcaggggtacgggagtggtgtgccgacaagtctggggttcccgctaaagacatttctatgtctgcatgtgccttgacttggcgcggtatcccgtctcaacgtagtgttcgagagctggctacttggggtatcactaagtcacactggcaggtcatgtccatccaagccctcgagggatccgtaaaatgttatgctcacttcttccattcgactagcggaacaagagcggtcccttacccatacgatgttccagattacgctctcgagcaccaccaccaccaccactga

SEQ ID NO: 380 - DNA, 3222 bp, synthetic construct
  source 1..3222: mol_type = other DNA
atgtaccccacctcggctgaagttccgcaaccatgtccagtatgtctctctagcctgattgatccaaagcagatccgagatcacttccgtaagaaacatcatggggtcctgatgcactggacatgccgcaagtgtggtagattctggccaaacaataaaagtgccgctagtcattaccgctattgtataaagagtctcccttcacttgagggtccatcaaagtcacataagtgtattgagtgcggcggcagcttcagtactctggccggactccagttacatcgcaagcgcaagcacccggaagcatacaacgagagtctgccccgccccacaggaaagaatcgcccttggggtgatgacgaacttaagcgtctcgcggcggtagaactggacagcggcggtactaaacatataaatattaaatgccaaaagcacctgcctcatcgcacaatcgaagccatagcctctattcgcaagaccgatcgataccgcattatccttcgtgagatacgtagcagccgtagtataagtcgagagactcgagaagaggcgactaccagcacgccggattcgagcaatgtactcgagcgcttaacgtctcgtattgcggaattgaaaagtggagactactctccaagtgttgaggctattctggcatacacagagagatgcttagaggatagaaatgcaagttccgggctgtctttactcccatctgaaatgtacatgccaaaaccaacttccgcatcaaagataaatcgcgggatgcgcaccccttttcgcccccaaaaccgtactcagagaagacgccaacactaccaacaagtccaactgttgtacaagcgagatcgcaaacaggctgcaggagtaatattagacgggtcccccttacatgtcgtccaaccagacgtggaaaaggtggacgaaattttccgctctcgattctcacgcccatccccgccggacgacgccgaattcatatcttcccccgcaggagttttaaacatggactacatcacggcgggtgagatccagcaatgccgtgattcaatgaagaagaacaatgctcccgggccggaccgtaacataacaatggacgtacttctggcgctggagcttccagtactggagttactcttcaatacgtggctcgcccttaaacaagtgccagcggctttcaagactgcccggacaattctcattcccaagtctggtgatacctctgacccgaacaactggcgcccgataactatctgctccttgatatctcgtctttacgcaaagctgttagcttcccggcttagtaaatgtgcaaatctgtctgagagacaaaaggcattccgccctgtagacggttgcggtgagaacaccgctatattgtctgcggtaatagcgcaggcacgcaagacgaagtcgcaattgcacgtagtgtttcttgacttggccaaggcattcgacaccattccgcacacctctattgtgcgggctctgaaacgaaaggcactgcccgggcattttatcgacgtcgtggagaacctttataccgaggcaactacttcaatctccgtcggtggtaagaacacgtcttctatgcccctcacttcgggcgtcaagcagggatgtcccttatctccgatactctttaatctcgtgctggacgaattaattactttgattggtgacgacaacggggtagacttgaatgacaagaagatagccatccttgctttcgccgacgacctggtcttactcagtcctacaacagacggtatggagactaacttgaagctctgcgaagggttctttgacaagagatccatgaagttgaacgctcgtaagagcgtgtcgctctcaatagtccgtgcacacaagcgcaaaaccatgctgacggatgagcgcccaaagtggaaggtacacggggaattcttgccaacaataaagcacacagaggagattaaatacctgggtgtgcgatattccgctgctggcagatctatcgctaagttccccaagcttgaccaatggctccaaagacttaagaaggccccgctgaagccccaacaacgcatccagatggtgcgttctacgatcacttcgcgactcatacacactttgcgattaagccgcgttcacgctaagctgctcaaggacctcgatcgtaaaatccgctcattcgtaaagtctgtgctccacctgccaagtgggacgtcgactgatttcttttatatcccggtgctcaagggtggcctcggtttgcaagaatttatgactctcataccagcagcgaagttaaaacttatcaactctatgaagaagagctctgaccaagcggtcatcgcagctatggaagtcgaccactggctgcgcgaagagagatggtgtcgcaaggttaccctgaaccaaggaaacaagaacgatgccgaacgccgccggcttgcgcgttacataaactcacctcggggtaaaagtcaggtcggcttcgcgaatcttcccggtcaatgtcgttggctcgaaggtggggcgaagctcacaggtcatgagtatattgtgggctgtcacctgatgtcaaacacccttcctgttcggacgcggacattccatggtggtcgggacagagtcgttacctgccgttactgcccaggcgttcttgagacgccgtctcatgctctgcaatcatgcccggttgtgcggaacgcggtgacgaagcgccacgacctcattctcacgaaattgcaacactttctcacgccaaattatgacagcgtaatccgtgagccttggttcaacggaagagagggtcgcatgaatccggacttagttctgaagcaaggtaagatggtatacgttgtcgatttgaccatcccctacgactcaagcccggagtttattgattcccaagcacaaagaaaggtagcgaagtatgatacactcaagccactgctccaacaaaagttccaagccgagcgagttgaggtgataggcctggctcttggagcacgaggtatgtacacaagcgccggcattcaaacctgtttgaagttaggactgagtgaccgtcaacgccgttatatgggtatgatggctttaagattgacgtgtgcggtatggggaatattccgttctcaacctagcgggctgttcaacaaggttcctgacacgggtactacctacccatacgatgttccagattacgctctcgagcaccaccaccaccaccactga

SEQ ID NO: 381 - DNA, 3222 bp, synthetic construct; identical to SEQ ID NO: 380
  source 1..3222: mol_type = other DNA

SEQ ID NO: 382 - DNA, 3861 bp, synthetic construct
  source 1..3861: mol_type = other DNA
atggacgcccatgtagacctcgcccttccatgtattcgcgtgtgttctccgaaatgtataaagccgctggcaacaactacacgtaacaaaacctcggtattatccgtcatggagcaagttccttcccgtgttgacagtgactcgctgcatggagcccagtctatcggtggggccgtccacagttgcgtggactgtgggcgtagcttcgacagcgttagaggactgaaacagcacgttaacagattttgtaagggcaaagccgctggatcatctgccgaagggagtgaggtgggtacggtcgcagaatccagcgccggtggagatgtgcaaaccagcacgactgagttgattcagtgtcctgcagttaccacatccaaaacgggcgagggctctgctacttgcagccagaagttggaacacgtacaaactccatcacgacagtctgcggatgactccgtggaagacctggatccgagaatgtgcgtccatgcgagcaccggcacgcattgtgagaagtgtcaatggtgcggtcggtgttggcttacgttgcaaagccttcgtcagcaccaaagacggacgcaccgagaagagtaccaaaccaaactgtgcgaggaacatcaattaaagaaggcgcggtggacaaaagaagaagaggtgcgtctggcggaaaccgaggtggaacttcgcaagtctggacaattccgtaacctgaatgtggaacttgcggaacgcttccctacccggacagtcgagtccataaaggcgagacgccatcgctcggagacatacatgcagctggttcaagaattgtccgagcactgcccgggtctgctggagatggcctctattcggggctctacgtcgacgataggcgagcagggcgacgctcatggagatgctccgagcgaggttgcaagtacggagcaagcggataactatgcggtactctgcgccgccagcgagttccctgaccaaaaccacgtttcatctgttcaaacgagtgcagtagttcaccatagtattcgggaagaaaacgagtttgacgatagtatcttcggaccagtcagcggcagcacggcagtgggcattggcgcggaaatgtctgagaagaaggataccacagcccaatcgccgtctgaactgagcgactggaagaacccaatttattactatatcgaggggcttcccgtggccacaacggttgacgacagtggcgagcgtctgttggatcgcgccttcgagatggaaaagggtgcccttacagacgtacgagatggtttaatcgatcgtcatgcgcagcagttcttatggatcacgcgtgacggtcagaagcgccaccaacgtaagggagatagccgtcgggagaaacgcgagtctcggaaatcacggcttggacaagacacgtcggccgctgagggcactggcggacctagccgtcgggcaaagcgcagacaactgtatgctcttttacagaagctttacgaaaaggatcgcaaccatgcggctgagctcgtcattaactcggagtggcaaggtttactggaaaagaaggtggtgaacaaggaagcgcaggtattgtattggaagcagttgttcgaacgccgctccgtaccggaccaacgcccatactcgactcaggttgttaagtgggatttattagaacctatcactgtggaagaggtacaaaagcaattactgcaggcaaaagaaaccgctccaggtcccgacggagtggagctggttgacctgcactcatatacggcgcgccacctttgcaaggccttcaatttgtggcttctgcgcgggagagtaccggaagcattaaccaagtctagaacggtccttattcccaagaagttaggtgcagaagatccgcgcgatttccggccaataacagtcagctccctgatcctgagaatctttcacaaagttttgatggaccgtctccagcgccatataagcatcaacccgagacaaaagggattcgtcccggtcgatggatgcttcgagaacctgtacttactggacgccattctgtggcgcgctaagcgctacttaagaccacttttcgtagcctttcttgacatcaagaaggctttcgactccgtcaaccacgatagtcttgttcgcgcactgaagaagaacggtatacctagtcccctgtgtgactatttgagtagtaatctgcgattgggtaaaacagagttacacgggcaacctgttgagatgcgtagaggggttaagcagggtgaccctgtaagcccgtttgagttcaatcttgttatggacgacgctgcttcgtatcttaaccagcacctcggcgttgagttcgatgacggagagcaattaacgcatggtttcttcgctgacgacacgtttatcgtggcgccatcgttggctgcacttcaacaacaattgacaaagttcgagtctgggctgcaggcgaatggtctggagctgaatgtggataagtgctattggttcggaattgaggtagacgggaaacataaacgttggttccaagacatgagaggggagctgaactttctcggtgagaaggtgactcgtatcagcccagcagatacatttaagtatttgggagttcacctgaatgttttcggaaagcgcatgtttgacccagcccgactggttacggcgcttcactccacaacatccgctcctctgaagccccagcagcgaatctatattttaaagaactatataatcccgcgttttctgcatcaactggtgctcggaaaggtttctcaacagttgcttgctagcgtagaccggattgtgcggaagttcgtccggcaatggattgcatttcccaccgacactccgttaggggtattctacgcccccgttagacacggtgggttaggacttccacagttgcagggcctcattccgaatctgagaatgatacgcttacaaagagttctgtcagctgagagcgatccgcttatcttgcacataagcgcggacactgagttcgcagacgatgtttacaaacgttgtgggtggccagctcgggttaaggggctgcgaataggttcgaagaaagagctcaatgattactgggtgaactctttgtatagctcggtagatggccgtggtctgcgagaggcgagcaatgtgccccaagtacatacttgggtggatgacgggagcaagatcctgtctggatcccaatacatacattggctgaaggtacgttacaacttggagccgacgcgttctcgcaaaagccggggccgcgaggagaatccgagagtttgtgataagggctgctgtgccgtagagacacttgcacacattgtacaatcttgccccgccacctggggaattcgtattcgtcggcacaacaccgtcctggccttgttagggcagtgtctttcacgaaagggttggaagatgaagcttgagcctcaaatccggtacagaagcaccacgttaaagcctgacttggtagcggcacgtgacggtcgcgcactggtagttgatgtccaagtagttgcagactccaccgaacacactctccacgcagcacactgtacaaaattacaaaagtacgacgtaccggaagtgttagagtacgcgcgtgaagtggcagggtccccgaccgccccagtggtggtcacttcatgcacaataaactggcgtggttgttggtcggagtcgctggcaggagctctcagacaagcaggcttgagctgggcacaagttcgcctgctggctctgcgggcccttcagggtactgcctcatgttacatcgggttctgccggaccgccggcgcttgctcatacccatacgatgttccagattacgctctcgagcaccaccaccaccaccactga

SEQ ID NO: 383 - DNA, 3717 bp, synthetic construct
  source 1..3717: mol_type = other DNA
atgaaaagacttgatcatcaaaatcgcccggtagcacgcttcagctgtgctggccaaaatgatgagcttgttcatcgtgcccgtaagaagtgcagccggtgtttaggccttacttccctgttctcagttcatctcgtgaccaagatgaacttgatgaatatgggaagcccacctggtgatgccctgcaggttaaatcggaaggactgggcacggcctcgggaataggtaacgggattgacggttgctgtccggtgtgtggaaagacgtataaggggtcgagaggtatgcgcatccattggcgtgctgtccatccggaatcgttccactctcgtgagacgacccgcctcgagagcgcggagagaaagactaagtgtcgctggagccaggaagaaacctctgcattagctcttcacgagagtcgcatcgtacgacgtggctgccctactggacgtcgtgatctgaacgaacagctggcgagactgatgtcgggtcggacctcggaagcaataaagtctcaccggagagcggagtcataccgtgagttagtcgccgcatatgaacgcatgggctcagttccgcgtacacgtgagctgccacgtgagacagtcgagaaggcagatgcgtcacggcgtgtgttacgtcctcgcgcgccgcgcggtagagacgaggtagagcaagtctcatctgatgcggttacacgcgttgccgaagcctgttcccctggtcctcacccgggtccgtatggtggcaataaacgtgagtgggacgaccatgcctcaactcagccggctacccgcgttgctgaagcaggtcacctcggtccctaccccagtgtgggagaagaatcgagcggcgagggagctgacagaacgcaacgcgttcgtgcaacacttgtggctgagctggatccagagtggctgccttcgggttccgacagcgagcccgggtccgaccgggaacaacaaaccgagtatcttgttacaatgggcgaattgccatccacccgggacgtgggcacacctgcaagaggccgccacccctcatacaccgaggtgaacggagacgagtttgattggcaatatccactgattgaggcgatacttgagcaggcacttagtgccgacatagaccctattttggttcaggtagctattgagaattctcccgaaaattcggactcgttacaacgcttaattgatcacgacttaatgggtatgtttccgcccattgagaaaccaagcttacgcggcggacctggtccccctagaagagccgcccaaaccgcgcgggccaagcgtcgtgagtcctatgcccgcattcaaagcttatacaagtcatcgcggagtaactgtgcgcgtacggtgctgaacggccattggcgcacggcgcccccaaagttatcaatgcaaacacagatggccttctggcgtcctctcctcgaaacaccgagtaagcaagaaacgcgtttaccacccgaaggggtacgcccacaatgggccatggtttgtccgataacattagaagaggttgctcgccatttagggaatatgaaggacggtgctgctggccccgacaactgcggccgtaaggacttacgtaagttaagcgcagtgtctttagcctgtcgtttcaatttgtggttgctgactgggaaggctcctgaggcttttaagcacggcattacagttttaatcccgaagtcccaggacggacacgagcctaaggacttccgtcccataactatgggtagcattttgtgccgcctttaccacaaaatactggccgagagagtggaacgtcattatcaaatcagcggtagccaaaaggcgttccgaaaaggagatggtttggccgagaacatgtatatacttactaacgtgattgaggaccgcaaggcaagatcccaggcgaccaatatagccttcttggatgtttcaaaggcttttgattcagtctcacatgaatcgattttattggcagccgcgagcgctggcatcccacacccgttagttcgctacgtccgttcggtgtacaccggatctactacccggctccgtgttgacggcgagttagggcccgacatacgtgttcggcgaggggtacgtcaaggcgaccctctgtcacctgtattattcaattctgtcgttgacttagcactgagacaaatcgaccaagaaatcggcgtatcagtggcaacagagaagttgagctgcctggcgtttgcggacgatctggtccttttagcgaccacaccgcgcggtttacaaacacagttcgagcgaattgagttggctcttggtgagtctgggctggacctgaatgcggccaagagcgccaccattcgtattgacgtttcaggcaaatccaagagatggatctgcaatccgacggcatttctgctggctaaggacgggcaagtgattaaggcaataaaagttaccgaagactaccgttaccttggtaacgcaattggaacctctcgcacgaagggatcgacagttcaagagctgcagcggggcatcgcagaattaagccgtgctcctttgaagccgcaacaacgcctgttcattctgcggaagaatctgataccgagcctttatcacacagccgtactgggccgcatgtataagaaatccttgaagtttctggaccaaattgtccgggcagcggtacgatcttggctgcgccttccaaatgacaccccattaggcttattccacgctcactatagtgacggcggcttagacatacccccgcttcttctgacagtaccacttttgcgtaccaagcgaatgggtcgtctggtatcaagtcaggaccctatagctcgtgccgtagcacaactgcccatatttgagcgcgagcgtaagagatggtcggctccactggcagcatacggagtctcgatccgcgacgggacaggcgtcagaaaggccatgggcgtaggactgcacatgtctgtggacggtcggggcttgaccgggagtcgtgaaacaggattcgtcaataagtggatggtatctggcgatgcccttatgtcagggcattctttcgttaactgcgttcgcttaaaatgtaatttgccgtatactcgcgccagagctgcgcgcggacgccccgacaaaccagtagcttgtgacgcctgccggagtcctgagactttggcacacattctccagtcttgtccgcggacgagcaaacctcgagtagaccggcatgatcgggcgaataaatacctgacagaggtggtaagacgttccggattcgccacccgggttgagcctgccatcccgacaccagctggtattcggtacccggatctggtcgtatggaaggacggtttgtgtgtagtcgtagacactacaatcgtggctgaccacaagaaccccgacgatgcccacgagcgtaaggtccgctactacgaccaacccgcgattcgtgggtggtgcgaaagtataagcggagtagcggcggatgaagtgaagttttcagcctgtgttctgacttggagaggtgtaccatctgtacggtcagtgcgtgagcttcgtacattgggagttactaagagcaactggttacttcttagcgttaaggcattagagggtggcattgcctgctatagccacttcaccaacgcaaccgtctcattctgttatctcccttacccatacgatgttccagattacgctctcgagcaccaccaccaccaccactga

SEQ ID NO: 384 - DNA, 3225 bp, synthetic construct
  source 1..3225: mol_type = other DNA
atgactggtgaggatcctcaagagtgcgcgaagtgtaattacaacatgatagacacaaagcaggccgttgaccattgcgcccgcaagcatcatggaatgtctgtccagtggaagtgtcggaagtgtgagagagattggtctaacataagatccatcgccgcgcattaccgccactgcacgggacggccgccctctccggtcgcaaccactgcgacgtcacacgtttgtgatcagtgcgagcgtgcttttacagggttggcgggcttgcagctgcatcggaaacgcaagcatccagcagcatacaacgagagtttacctcggcctacaggcaagaatcgacttctgggagccgatgaattgacccggttggccggcgtggagttggacttgggtacgtccaagcgtataaacttagtgtgtcatgaccatttccaacatcggtccgtagatgccattgctacaattcggaagtcaaagcgttacaaagacatcttaaaggtggtggtagaaacccgtagcctggttgatgagcaggaagcaggtgaaggcgcccaagctcctgagccctttataaacatcgtggaagcacaattacgaacgcgattcgatgagctcgaaggagattctagccccgccgtacgtgacaccctcgcgtacacccgtacttccctggctgagggtaacgccacgattggccttgacctgctgtccgaggaagtctaccgcccgcgcaaggcaccggattcaacctcaaatcccagaaaacggggacctgactttgcgcccactacccgcagccagaagcgtcgacagttgtataagcaaatccaatcactctaccaaagaaatcgcaagcaagcggttggggtgattctcgacggagatcccattcagactgtattccccgacgtggaccgtgcagacgaggttttccgtggtcggtttgcgcgcccctctccacctgacgataaagttttcaacctggttcctggtgacacgatgaacatgggctacataacctcagaagaaatatccaaatgtcggtctgcgatgaagaagaagaatgcacctgggccggataaagaggttactatggacctcgtattgggattagaacttaccgtccttgagctgatctttaacacgtggttcgcgttaggccaggtaccaactgcgttcaaagaagctagaacaatcctgcttcccaagtcgggtgatgcaacagacccaaacaactggcgcccgatcactatatgctccctgatcggtcggctttatgcaaaattactcgccgggcgtttatcaaagtgtgccaacttgagcgaacgtcagaaagcgtttgtaccggtggacggatgtggtgagaatacagctttgctttccagcgtaattgctcatgcgcacaaggtaaagacacaagtgcacatcgcattcttggatttagcgaaagcgtttgacacggtgccgcatacctcgatcttgagagcccttcggcgtaaagccctgccagaacatttcatcgcgatagttgagaacttatactctgatgcgaatactagtatttcagttggcgataagtctacgccatcaatccctatgacttcgggtgttaagcagggctgcccgctcagcccagttctcttcaacctcgtgcttgacgagcttattcagaacattggcacaatcgacgggctttcggttggtcattccaagttagcgattttggccttcgccgacgacttagttcttatcagcgggaccaaagatggattggcatccaacttacggacgtgcgaggaactgttcaatgcacgctcgatgaaattaaacgcccgcaaaagtatgactttatcgttagtccgcgcgcacaaacgtaagacgatgctcactgacgagactcctcattggaaagtgtatggagaatttctgcccgcggtaaagcacacggaagaggtgaagtacctgggcgttcgttacaccgcaggcggccgtccgatggctaagctgcccaaactcaacgactggcttcagaaactgaagagtgcacctcttaaacctcaacagcgtatacaaatagtccgatcaactataacctcacgcgtcatacatacactcagactgtgcagagtccacgccaagctgttaaagaacctcgacagaaagattcggactttcattaagggagtgctgcatctgccttccggtacatccactgattggttctacattccaatacggatgggtggccttgggctgcaggaattcatgagtttaatccctgccgccaagctgaagttgatcgacgggatgaagaagtctcaagacccaaccgtagtggatgcgatccgacaagagcattggctgaaggaagaacgatggtgcagagcagtcagcagcctgtacggaaacaaggagcaagcggaccgaggtagagtcgagcggcacatatcctcacacacgggtcaaacccaaattggcttcgctcgattgccaggacaatgcaactggctggaaggtggtggtaagatgacaggacgtgattatattgtggggtgccatatgatgtctaatactctgagtgtccgcactcgcacgtttcacggtggtgttaacagagtgacaacttgccgttactgcccgggagtgccagagacaccgagtcacgcacttcaaagttgtagcaaagtgcgggacgcggtgacagcacgacataactcgctgctgaccaagattcaacattttctgacaccgaactttgattctgttatccgcgaaccgtggttcaacggagtagaaggccggatgaacccggatctggttctgatccagggacggttgctctacgttgtggacctgaccgttccttacgactccaccattcgtttcatggactcacaagcccaacgtaatgttgataagtaccaagtgttggagcctctcctgcgtacgaaattccaagttgagcgtgtaaaagtattgggtcttgctgtaggggcgcgtggcttatacactcaaacgggtgttgacatttgggcgactcttgggttgacagaacgccaacgccgttgcgtaagtgcgatggctcttaagcagtcctgcttgatctggggtcttttcaccgggaatcgacagcctcaaccgacactcgacacaggcacttccgccgcggagtacccatacgatgttccagattacgctctcgagcaccaccaccaccaccactga

SEQ ID NO: 385 - DNA, 3576 bp, synthetic construct
  source 1..3576: mol_type = other DNA
atgggttctgccacgttatactgggatatcgggatcgcattgccgaccaaaacgaataagaaggtcgctcgggttagcttgacgcgtaatgcgcactctgaatctaataaaatctccgactcgaatccgtcttccacaatttatcaaattgactaccctattgagtccgagtcgtgttctttatgtcatgaagacctgccgaacttaaacctgaaaatccgtgagcatataaacgatgcccacgggattgtgacaatacgctacaagtgtcggaactgcggcaaagagtacgacacgataagttctatcaagtctcattacccggcctgcaaaagaaagcaaacaaacaacaacctggccgcagccgttgcgaagcctgcgagcacaaatccacaattccctgtgacacaccaaaatatccctaatattccacccctgcaatgtgtggagtgtcactcaaagtccagttcgttcacggccaaagaccgtaaaggactcatcacgcacatgcgcaccaagcacccgcaggcgtatgaggagtcaaagaaggtcgccaacatacgcatagcatggagcaatgacgaggacaacattttggcgaacctcgagatcagccttaagagtacccaaaagggtcagattcttgagcggctgttcaacgagtggaacaagttggtagttcaatcgcacgccaattaccgctcaaaggatgctatccgtgcgcgccggcaacaacaagagtataaagccatcctgcgcgacttaatacaaaagcaagacgacacgaatgctagtagtgacgacaacgactcaagtacagacagtgactcacctagtatccccgcgacgatctgtaatgacatgaacgccattcacaagttactgaatgatattgtaatcgcagggcacattaagctcagtgaccacatgaagaacgcaatcgacgctttcttgaaccccaacaaagctatagaccccgtaaaattaacgatgagtggtatcaaccaatccataaccgacataagaaataagaacaacaataaccgtaattcatcacgtgtgaacggtaccgctaccgctattaacaagaagccggcccgcaacaagagccgtatcgaaaagagtaagcaacatgcctactatcagcggctgtacctgaagaacaaatcgcgtctcatggacgagattatcgacggcgtagcgccgaatgttgatcccccgccaattcacaccgctatacaatattacgagcagatttggtcgatcctggtgcaagatacgcatcccgttactactaagccggacttcaacaacaaagacaataccctcttatccccgataactaaggttgagattcagtgggcaattaagaagacgaagcgggactcagcaaagggtgtagaccaaataacactccaagaggctaagctgctggcggaagacgatttgtacatagcatttaacatatggttgggctgcaagacgattccaagcgaccttaaactcaatcgcaccaccctgatccctaaggggaagcaaggtcttgatatgataactaattggcgtccaatcacgatttccagtattctgctgagactgtttaacaagatcatagcctgcagaatgaataagtacttcgagattgataaacgtcaacttggattccggcctattaacggatgtagcatgaacatcctgtggctgcatcatttgcttaagcacgcgcgactcaaccgccgtgatttatacgtgtgtcttatcgacgtagcaaaggcatttgactccgtgcctcacgagagcatcttccgggccctggttagacatcatgccccgtcgtcattcgtagagcttgtgcgtaaccaatatgcagatagttatacctcgatcacgtacaagaatcttagctctaagcggattaagatactccgaggtgtaaagcagggcgatagtctttctcctctgctgtttaaccttgtaacggatgagttattcggcatactgaaggaccaactcggttataatataacaaacattggatcctcaaacatcaagtgtttcgccgatgacatttgtctgatatctggttcccgtattggtatgggacacatgatcagcgagacggtgtcattcttaaacgatcgcaacctgcaagtgaacgccaacaagtgcatgtccattggactccagaaaggatttaagggtaagaagtctaagattgtgacagagccaattttcacaataaacggcagcctgatacctattctgggccacgtcgagaatcatacaaaatacctcggaatccaattcacatcagtagggatggtaaacgcgaacgtcgccaaagaccgaattattatggtactgaacaagctgcagaagatcccgctcaaaccccaacagaagatcgacttgattcgtagtcatgtgattcccctgtttatttatcaactgatcaatctcgagaactacccaaaattacttaaggaaatcgatatcctgataagaagagcgatcagaagcatcctgcacctgaatataggcttaagtattgagttcttttacctgcccatacgtgacggcggcttgcaaattcctctgttgcgtgatatcgtgggcctggctaaggttagaatctataagtacatcatgcggtccgacgatgaattactgaaacaccttgtccagaagcaagcgttccctatactccatcgtttcattaatgagttaaaattggactcctcgtatgagactagcgacattaagcttcgaaagattcaactcgtgaaggaccgccgggtatcctacgcgggcaaggttcatgggtatggatccgaagttttctccacctgcccaagcactaacttctggctgtacggggataacaaaacagttaccgggcgtacttacattaacggcatcaagctgcggactaacacacttgagactcgagttaccgtgaccagaggctgtatggttgacaagacctgccgcatgtgtaaggaagaaaacgaatcattgatgcacatccttcagttctgtaagacaactaagggtttgagatacgccagacacaacagcgtttgcgcccgagtggtgaagaaactcaaagaaagaggctttcaagtatacgtcgagcaagcttacactaccgatgagacgggcctgcccaccttactccggccggacatcatcgccgtgaagttagatcacgcttacgtactggacgtgcaggccgtctacgaaagcagtggagctagtttcattaacgcctacaagttcaaggtggacaagtatacccccttaattcaagccatcaagaaccgccataagtgtaaagatgtaactattcacggtctgattattgggtcacgtgcgtccttccaccacggtcatattcggatctggaacgaattcggatttagcagctcggagttaaagtatatggctctcaattgtcttgaaaattctttacgcatttggtctacgttcaacttcaaccgcttaaacagcttcaaccgttcttacccatacgatgttccagattacgctctcgagcaccaccaccaccaccactga

SEQ ID NO: 386 - DNA, 3540 bp, synthetic construct
  source 1..3540: mol_type = other DNA
atggattacaatatacttatgcgctacgaggggcgagaatgcattcggtgcgaatgtggagtcgtgtgtaccacgcaagctacaattaaagagcactgggcttcggttcacagagtgtgcggtttagtgctcgtatgcgacaaatgcaataaacgattcgtgactcttcttgcggtatcttgccacttttgtaagtgcgatgcggtcgaggtcgaatctgtgggtccggaagaatgtaacctctgtggcagatggtttacacaaggacgttcgatgtcggcacaccaatggaaggcacacccgctgcagtggcgggcccgaaagggcaaagcggaacgaaagcgacgtcttgacttagttgaggaagaagacgagaatgtaggtcgtccatacggacaagaacgcaagcgtgcacgtgtcgatgaagacgagaacgctggacacccgataggagagcacgttgaggtagccgggattacgcccggcaacggggaagcaataggcgtagaagttgtctttccggacacgcaagagcgtgttcaaatgggagttgacgaggatgacaatacgagacaccctgtctcagagatagaagagggtgccgggattaacccaggtaacggtgaggaagtagatgtggatgccattcacagtgacagccaggagcaaatgcgggttgacgaagacgagaatgctggccacccggtttcagagaatgaggaagttgttggaaacgcgcctgataatggggagttagaggtagccggggttacgcccggtaacggggatttagttgatgttcacctcgtttcgcaagctgcaggaatcgatgaagcagtcgggtctgggttacacgttggggctggtattgctccgtcagaaagtgtcgaagcgttccgtgcagcactccgttcgttagtcgtggaaggtggtcttagcggtctggttcgcgacgccgttgttaacgtcttgaacgacgagggcggcgagagaattgggtccgtgttaaaggatctggttcaagcaattgggttggaaaatgcaacgactccaggcacagcgcgcagaccggggcaccgcggtgggttcggccgtcatcgacatgtgggcaacaaggccgcttcaatgtatgctggtttccaggccatgatgactcggaatccttcggaagtggcacgttggctttgggaaggccgtgctggtgaagaagggaacgtagtgccaccaatggatcatttagttcgcattttcggaagtgtgatgtcagtcgacggggtcgaagataacgagcaaatcgcctcgtgccaagaaggggtaaaggttttctaccctgtgacttcacaggatctcgataaagccttgaacaaggctaacgctagcgctcccggccttgacggtttgcgcatcgaatccttaaagcgtatgtcaggtgataacaagtcaaacgctgtagcccttgtaaatctggcattgcttgccttcgggaactatgaacgtactgtgcgcacagtaatgataccaaagtctaccgagcacctggaagacgccgacaattggcgtccaatcgccattgccagccacatcattagagtgggtcatcgagttcttgctcatcgtctggaatctcaagtaaagctgcatccggcccagcggggtttcactcgaggagacggacttgctcggaatgtatggcttctggacgctataataaaacacgcgcgtgtcaacaatcgcactctttgcgtagtaagcctggacattaagaaggctttcccttcggtttcacactcttccattgcgagagccgtcgaccggttcggttgcagccccgttttctgtgagtacatacgatccgtctaccgcgataacgcgacagtgcttcagtgtggcaagtcggtttccgacgcaattctggtgaagcgtggcgtgcgtcaaggtgatccaatgtcatcggtcctgtttaacatggtaatggacgagctgttgtgtttgttagaccccgcccttggctacaaattcgatggtacctgcgtcaaggccatggcgtacgcggatgacctggtgttggttgcaagaagcgtcggcgctatgaagaaacttctcacaggtacggaagagttcctgcttaaacgcggccttatgcttaatgaaaagaaaagcgttgcactccacctgagacggggcaaaagagcggtggtcctctctttagaggaagtctggagcttgcgtgagggcgccattggtatggtttcggagatcaagagccttacctatttgggcgtccgtttcggtccttatggaaagatgaactatgataccaaacctctgtctgatgcattggggcggctctgtcgcgcaccgttgaaacctgaccagaagctccttctgttgaagactcatctccttcctaaagctcttcactcacttacccttggttgttgtgataagaaacttctgaaaaccttagatatgcgtgttcagcacgcagtacgttctattctccatattaagaaggatgtaccatgtgcttttatacacggccctagtaagcacggcggcctgggcgtcatgtccttcgtcgcagacgtcccacgtcatgtgtgtaatcgcatagaaggtgtgcaactcgcaggtgaaggcggggagatgcgcgctctcgttgactcattttacttcgagagcattcttcgtaagttgcgtacgccggcgactcaagtacctgacgaatatgttgcgcatctttctcgaaagaactgccgtcgtaacatgtcagttcgcctgaagcaagctgacatgtcgtccaagtacgacacgagaggaatcactgaggtagcagaacacggtgatagtcgcgcttggttagcgtccaagccggttttctggcctgcgcgaacttacgtaaacgccgtccaatggcgatgtctgtcgataacttgccgttcgcgcgtgtcacacgggcgcgccggcgaccgtctgtgtcgaacagggtgcggcaaaattgagacggcttttcacatctctcaggtctgcccatcaacgcatttagcgagagtggcacgtcacgatcggatcgtccaattaataaagcgttccgcggagtccaaaggtcacgccgtggtggtagagccgcggataactaccgcagcaggtatccgaaaaccagacctcgtgatagcgaatgctagatctaaaacagtattcgtcgttgacgtgcatgtagcgtggaaaggtctgcgccaagcatttgacgctaaggtaaagaagtacgggagacataaggaaatttcagacttcggccgaacactgcttcccgaggcagagcgtgtccaattcggtgctatagttgttagtccccgggttatatgggcaggtgcaaacgagcaagtagtgaatggtttgcaactgccgcatggtattcgaaaggtcgtgcttgcttcctgcgtggaaggtaccatgaaaatcctttccgctttcaacgccgtccagtacccatacgatgttccagattacgctctcgagcaccaccaccaccaccactga

SEQ ID NO: 387 - DNA, 3615 bp, synthetic construct
  source 1..3615: mol_type = other DNA
atgacatcctcacagtcatgttcccaaccagtatgtagtagatcgaaaccgtcagacacgaccgtgttatctgactttcaatcgcaacctaccagaaagcgtgcttcggcaaaacaaaaggacagccagtcgtcggaaactcgaagctgtgtttcaaagaaagacaccaccctttggaacgatgacctcgtttcacaattactcgaaataagaaagatggtggtccctgaccctaattgtaaagtggctccatacgggagttggaaacgaattcatcagatttggaaggaacgtaagctcccaaacatgacagagcaacaattgcgccaaaagtggacgcaattaaatcggaagaagaacgttgacaaacttgtaaaccagacagaagagatgaattctgaggtacataatctggatgaaaacgagaaaatccggatgagcgacttgtataagaagctggaaccacttattatcgacccgaataacttcacgctccccatcgaatctcgtacctcaacacgtatgaagcgaataccttcttctagcgatttaaaggttcttaacctgctgtttagtgacttgtacccacgcatcgagaacctgtttcatgacaagctgctcgctatcgacacccttctttacacgatagtacacaagtataagtcaataaaagaaccaatgcaacaggcaatctacgacaagaaggaacaggaccttatcaacgctataaagaacatcacgcgtaagctccgccctctctatgctgcgatgcatcgcatgcgcaacggtgttaaagagacgtcacaaaagatcgtccaacaaatcgttgaagaatacaagacgttcgatcttaagtctttaacaacgaagatcgggatgatgaaacaagaacgtaatagatacaagcgtattctgtcggagtacaagaagcggaagaaattctttcggacgaacgagatgtttatggtaaatgagaagaagttctactcaatgatagaaaaccgcaataagaccaaacgggagacgccggacgagaaagaggttgtgcaattctggtccagtatatgggagcgtaagaagagttgcaacctcgatactgcttggatcaaggagataagcaagaagcttgaggagaagctttcacttgtagacaaagagaacacccgaaattcccggaagctcaagactaagacggccaacaatctgaagcaggttaactctattttcaacttaaatatatcacacatcttcaaatccatccataagaagaagaactggtctgctcccgggcccgacatgatttgtaactactggtggaagtatattgactccacgtggcccaagctcctcgaggcatttcaacagatgttgaataacacggtaccgatacctgaatggttctgcgcgggcgttacatacagaattccaaagcaaggcccgccgtgcgaggccaacattcgtcccataacatgcctgaacacggtgtacaagatgttcacgtccatagttctttcctacctgtctgcttacctggatcaacacaaccttatgacaatagagcaacgcggtgccaagaaaggtgtctggggtacctatgaaaacttgttaattgatgagataatatcccaggatgctaataagcaccgcaacaagagcttttcggccgcatggctggacattacgaaggcttacgactcgattccgcacgagtggattatgaaatgccttgaaatccacaaggtcccaaatgaaatcaaagccgttatccgtcaactgatggagaagtggtccacgcgcatttactacgactttcagaagaagacacgtactatccaaataaagaacggcatctttcagggtgattctctctgtccattcttattctgtcttgcactcaacccaattagcattcttattaaaagctggaactgtggatacaagctgaacagcgcggatatggttattactcacagtatgtttattgacgatatcaagttgtatagtaccacccaggataagatgaatggtattcttagtttgcttaagagcgccctgtctgacataggccttagtatcaatgacaagaagtctggtactctgataagatgcaaagggatgattagtgaacaaggagtcaagctccaagatggtacatcgttcccggcgataacgaagactaacttataccgatacttaggtttcatgcaaagtttaggcatcgacaaggagaagaataaggaaatggttatcaacgagttcaaagagagagttgagcgtctggtgaattcttccctgtcgggatttcacctggcacgcgcttacaatacttattgcattgggtatctccggtacttcttctttatgaaatggaattactacgaactgaaccgcatggagcagatattaaagaagagcctgaaacagaaaggcttgttcttccgtggattcccggttgccttattccacttgcccagagacaaaggcggccgcgggtttcagtcagtgtttatggaatatctcatctatcgcataggacttgcctttaagttccacaaaagtccgcacatggagagaataaccaacttactgcgagataaggactgcgactcattttacaatgatactctgacttacggtaaagagttcggcctgcaatttgagttccagaagaatcagaatatcatcataaaagactctgaaaccaaggaagagctcaacatatcaagtaagaagaaactcactcaactgttacgagacagagcgaacaagaagtggttgaccgaggcagaggaaggtggtatgcacttcaaattttggaacatgtataaagagcgtttatcttggatcaagaattggcggttcattaccaagcaatgcgagaatatgttatggatggcgatgacggcaaacttacagacacgttctctgacgaaatggtacaatacacagcattcgaatggactgaagcaacaaaacaacataaaatgccgattgtgcggcaaagctaacgagacgaccgaacatattgtgagcggatgctctgcgttgatgaactcagatatcattccacgacataactcagtactgtaccacctgttacgtatgatcttagaccgtaacggaatccaacacaacggtaccgtgcagatggagtacagcactgacaaggtgcgaatccaatgcaattgcaaaatcttgaccattcgcgaggttgagcacaacgtcccagacctggtggtgtatctccacgagcgtaaacaaatacagattatcgacattgcagtaccatatgacgacaatctggagatgagatataacgaaaagatacaaaagtatggcccgcttcagatagagttacaaaagcttaatcctggctataaggccacagtcatcccgatcgtaataggagccttcggagtaacactgccaagttttcaggagaacctgaagaaagttttaggggagaactgcttatacgaggctaagaagttgatacgggcggctatctcaggcaccttcctgatcttgacgaagtgggagagtcgtgcaaagatcgtggactacccatacgatgttccagattacgctctcgagcaccaccaccaccaccactga

SEQ ID NO: 388 - DNA, 3150 bp, synthetic construct
  source 1..3150: mol_type = other DNA
atgtcaaaccctaataaggtaaagaaaataacacacagattttgggcccataagttcaagcgcaaaggcaagggcaagacgaagaccaataagatgtcaaatttaccacgccctaacttctcaatagaggagctgaagaaggtgcttgcgcggaagaagttagacacggcgccaggcccagacgctattccctattccgcgtaccgcacactgaatgaagacaacttgtcggccatcctggaagagattaactcgaaaattaacgacacgccagaggagtggctcgaggctcttcagtggaacatattcaaggaaggtaagaaggaagaactcaacaactacagaccgatcgccttatgcaacacaatttacaagattcaaacgttattgattaaggaacgcatggaagagattacgactgaagagaatctgattcacccgagccagcacggtttcaccaagcaccgcacaacatcccacaacataattgccctgaagacgataatccacaaggataagttggaacagcgggagacgcacttactgttcctcgacatcgcgggtgcctatgattccgtgccgcacgaggccctgtggtgtacgcttgcgaagaacccatcgattcaaccctacgctatgatcatccagcaaatgtactcaaaggctactacacaaatcattacttcggttggattaacagacaaaatccaaatcgaacgcggagtgcgacaaggggaccccttatctccgctccttttcaacctctttattaatgaggttattacgaaagtttacaaacaacatcggggctggcgtaccaagaaccagaactaccccaccttagctttcgcggatgacctggtactctgcgcaaacacccgccgcgatcttcagacgatcactaagaaggtcatacgtttcttacgcaagaatcatatgaacataaacacaaagaagactatctacacatcctctaatcgtcgtcgccgatcaattcacttacaacacaacacaaagataaaggaagttaagaaagggaaagcagttcgctacttgggtgcttacctgtctcttgaccagccggacaagaaagaaagcgacacacgcattgccgagttatggaagcgcgttaacctgataacatcaaagaaactgtacccgcacattatggcagaggccgtgaacgcgttagcgtatagcaaaattgtttactccttcggccataccaagtacaagcgaaaggctttgaaagagattgacaagaaagtcgcgcatctgatccgcacgaaaaccggggcttacccatttcacacggataaagtccatgcaaaatggcgtgagggcggatggggcttgctgtcgctccacgatctttacacacgcatgatgacaggtactttgttcgatcggatactgaaccggccgaatacaatttctaagaagattatatgtgaggcgctcgaggagattggggagtctaacaaggagattccaggaagtatcacatatcaagcgttacacgcgccgccaacgattaagcaagcttggaagatcgctcgggaagagggtttgattccgatcaacacgacgttgaatctgctccacccagaaaccatacttagcgcccacccactggttattgatgagcttaaccaaaagggaatctccgacgtaactactattaaaacgaaccttccgcagtcagttgccaattatctgctgggtccgataaacaacctgcttccgtttatgcgtcgcgaccaagagatgcagccgcctcaaaacacaatacaaatcgaaaacagccgggttgtgtggacagacggctctctgaagaaaggggagaactcaggtacagctggaatattttatgatctgggaaacccgggtaataagaccatccacatcccccattgcaattcttcttttgaggcggaagcgattgctatacacgcagccttgcgggagtgtcctcaagaagaaaacatacgtataattactgactccttgtctgttatccaagcgattaatagcgaggatagcccatcttatgtgatagagggcatcaagaaacggatacaggaacgcaagggtaagcaatcgcggactgagattattcacatttatagtcacatcaagaagaagaagaagaagtcacaggtctgggaagagaagatacgagatcaagagatagaattgttcccccatttccgccagtatcgctggggaaataagaaggccgataagctcaccaaccaagaggctagcaagcagaaaggaataccaccatacgctccagagttcatgatatttaataagcagaagcttaagtgggaacctcttcgcgtcaaagacacgctcaaacgggaacagcgttctaagattattactactaccaacgagcgtgatcaaggccgacaccccagcctgcaacaaaccaaccgttctctgagcgagatcgccttgaagaacccgaccatccaagccagtgaagcgaactttcttatcaaggcgcgaagttactgtttacccattccagaccgtaagaataaaccggctatttgtccaaaatgcggcggtcttgagacacatcagcaccttttattagagtgtccaaaccttgaggaaactaagaagcaaattgttaagaagatgaaggagacactgactaaaatggcgattccgcatatcgtagccaatgaatggttcaataacgagattcctacctacatgtgggccttgggttatattcctaagaagtgggcccaacgcatgaagcgtatgattggtggtaagcctctgacatcagcgatcgcgattgcaacacgtatcaccagcaaattgactttaaagtccttcaaggagaatcgtaaccaaatacgtagaccgaaccggcgtgcgaatcaaagaaacactaacccgacacgtaatgacaccgacaacgcatccgataacgacaacacccaagtcgccaacgctaccaacgtaaatgttgccctgcaaatcgacattcgtcaggccatacttgatgcgttggagatcttacctgatccgataatacctactacaccatctttacaccgtacaacaccccaatacccatacgatgttccagattacgctctcgagcaccaccaccaccaccactga

SEQ ID NO: 389 - DNA, 2919 bp, synthetic construct
  source 1..2919: mol_type = other DNA
atggcagctaatctggttacaatctcttataatcttcacggctataatcaagggtgccccggtataaacgagcttatcttgaagctgcgcccagatattttcatggtgcaggagcactggttaagtcctgataatttgagtaaattagacaatatttcagattgttactttgtgttcggatcgtccgccatgcttgactgcgttagtagcgggccattggtgggacgcccttttggtggaactgctttcttaatcaataagaagcacgtgagcgccacctctaacgttgaatcatccgatcgcttcactgtcatccggatctacaactggctgcttataaacgtttaccttccttgtgtcgggacccctcaccgagacgaactgtattcagacattctcttacaattgcaaaacattattagtgccaatagtgattgttcgtgtttgataggtggagatttcaacgtggacttagacgggaactccaatatatcattattagtcaatgagtttatgtgccacaacaatatgcatcggtgcgacgtgctgttcccagtttctaaccggaacacatttatgaacgaggccaccaatacgggaagtgctatcgattatatgctttcctcaacgagcgacaaaacgattgcgttcaacatactggacctggacatcaacttatcagatcattcaccgattatggccgtgtgcgccctggacatgtcatttcttcccctctcaactcaatgcgagtcatgtagcccggatgatgtcacgcatcttagatgggaccacgcacctttatgtatgtactacgagcatacccggctgcttttgcaaccggtccttacgaatctcgacgctctcctcgaaagctcagacagcgccgacgatgtgttctgtgttgggtctgcggaccagatttactgcaacgtggtaaatatcctttgtgaatcggcgaatctcttcgtaccgaagcacaagaagaacttttaccgcttctggtggagtcaggagctcgacatgttaaagagcaaggcgatagagtccagccgtgcgtggaagggtgcaggaaagccaaagcacgggtccatcttctctcaatacaagcaagataaacttctgtacaagaagagaattcgagaggagtgctttaacgagacaaaatcctacacgaacgatctccacgacgcattactgtgtaagtctgggcaagcattttggaagacctggaaatcgaagttcgaaagtaagtccaccaacgtgcttcaagtagatggaactgcggacagtggcattataacggacaagttcggtaagtactttgaggctaactgcagcccctttagccccgcgagaaacgaagagttcaagaagaaatacaccgaattgcgcagtaactactctggttcccccattaccgatgatcaagtgtttgacgtggagctcatttcacgcttagtgtcaaatatggacaagggcaaggcagccggattggacgagctgtcatcagagcatttaaaatttagccaccctatcctcatctgcatcttgactaagcttttcaaccttttcatagctaaagggcacattccgactagcttcggcagctcatatacggttcccatcccgaaatgcgacggtcgcacgcgcgcgctgtcagttgatgacttccgtggtatcagtatatctccggtattgtcaaagctgtttgagcttgctattcttgaccgcttctctacttactttacaacgtcagaccatcaattcggtttcaagaagcacctttcgtgccgtaacgcaatctactgcgtacggaatgttgtcgagtcattcgtctccaacggttcaaccgtaaacgtgtgtgcgcttgacttgagcaaggctttcgatcggatgaaccattacgctttatttatcaagctgatagagcgtaactttcccacaaagctgctgaatgttctggaaacctggttttgcgcctcaatcacatgtgtaaagtggggccggaacgtttcgagtttcttctctttacacgccggggttcgccagggcggtgtgctgtccccaatattgttttccgtcttcattgacgatattgtgacaaaggtcaaggccgcgaacgtaggttgctacatgagcactatatgcgctagcatattcttgtacgccgatgacgtgttgttggtggcaccaagcgtagctggtcttcaatctctgctgaacgtctgcgagaacgagttaataaacttagacatgagaatcaatgttaagaagtcgatgtgcgttagattcggtcaacgattcgatgcgccctgtgtggaattagtttcaatacatggtggcagcctgaaatgggtgagtagctgtagatacctcggcgtgtactttgtttccggccggacgttcaagtgctgctttcactccgccaagtcccaattctaccgggcgttcaattcattattttctcgggtgggtcgtgccgcatcagaggaaattattttagtcttgattaacgcgaagtgcatgcccatactcatgtatgcattagaagcgtgccccttactgtctagagacaaacaatcatttcagtttacgattacccgtcttttcatgaagcttttcagaaccggctcaccagcggtcgttgaggaatgcgaacgtcactttaacttcctgccgttcaaacaacaactcgacattcgtacagctaagttcttacaaagtttcatggcttcggagaactctttatgcctcttattcgagagtaacgcacgacttcaacttagttccatctattcgaattacggtcatacaattcggacagtgtgtcagttagtaaataagattcatgaacaatacttttgctacccatacgatgttccagattacgctctcgagcaccaccaccaccaccactga

SEQ ID NO: 390 - DNA, 2973 bp, synthetic construct
  source 1..2973: mol_type = other DNA
atgatggcggcattatctaactcgactcatttaatcggtaacagcaattgcacaggagcgcggctcgtagttatatcttacaatttacacggtttgaaccaagggatgacgggtattcgtgagttaattcgtcatgttaatccggacgtgatcatggtgcaggagcactggctcacctcagataatttatttaagctgtcggacatctccgataagtatttcgtgtttggcagttcggccatggacgcacgtgtttctgcgggacctcttgtgggcagaccgttcggcggaacagcaatgctcatcaagaactcgttcgtcaatatcacagtcggcatagctacgtgtgagagattcacagcgattaagttggcaaactggcttcttgtcaatgtatatctcccctgttcgggtacggaccaacgtctgctcatctattcggacgttctgtgcgaggtccaaagtcttattacggcccactctgactgcgattacctcgttggtggtgatttcaactcggaccttacagatgctaaaagccacgcatctaatcacatgataaacgacttcatcgttacgaataacttgtgtcgctgcgacgtggttttccctgtcgctaccaagtacacctacataaatgagagtcttgactgttcaagtactatagactacatgcttacgtccaactgtgacagcactattgccttcaatattgtcgacttggacctgaacttatcagaccacttgcctatcctcgttgtgttggcactcaacgctgatctttccaatgcgacatgtaacgctaacccgagcgtagacgtgacccacttacgttgggatcacgctcagatcaacgaatactatgaccttacccgcttgggactggacccagttctctgtgaactcaccgtggttatcaataaccttcattgcgctccagagtccatggtgtcggatcagatcgacgcattgtacgagcgcgtcgtaaatgtactgtcacaatgtgcagaccaatgtgtgccaaaacaaatcaagaacttcttcaagttctggtggagccaagaattagccgaattgaaggaaaaggcaattgccagttgtagattgtggaaagaggctgggcgtcctcgtaacggtccaattaatgttaagtaccgtcaggacaagctgttatacaagaaacgtattcgtgaggagcgcgcagaggagagttcttcctttaccaacgacctgcacgaggcgttgcttcggaagtcgggaagcgacttctggaaggtttggaacagcaagttcgagaacaagagtagtaagattatccaggtaggcgggactgcggacagcaacgttatagttaactcattcgccaagcacttcgaggaagtttgccaacctttcacagcggccagaaatgccgatctcaaggcccaatatgatgacgtgcgtgtaaactactcaacgcccccggtgttcagcgacgccgagatcttcgacgctgagttggtggggaatttattggtaaagatgaagaacgggaaagctgccggactcgacggcattacttccgagcacctgaagcacagtcacccttccgttgtggtgatcttgtgtaaactctttaacctgttcatcgcaacgggccatataccaatttcttttgcggctagctacactgtgccaattccgaagtgcgatggccgcagtaagtcattggaagttaatgactttagaggaatttcgatctctccggtgataagtaagctgtttgaactttgtgtcttggaacgatatcgtgactatttcgatacgagtgaccaccagttcggatttaagaagaccctttcatgctcacacgtgatttattctgtgcgtacagttattgagaacttcataagtaacggatcgactgtcaatctgtgcgccctcgacctttcaaaagcattcgatcgtatgaatcactacgctttatttattaagctgataaagcgaaagtttcctgtcgaaatactgcagatactcgagcactggttttgcggatctaaaacttgcgtgcgttggggcggtcaagtcagttacttcttcgctatggtggccggagtccgtcaaggtggggttctcagtccagtactcttttctatcttcattgatgacattgtaaacaaagtgaagctggcaaacgttggatgttacttatcgaatatatgcgtctctatcttcctttacgccgacgacattttactgatcgcacctaccgtaacgggcctgcaaaccctgcttaccgtgtgtgaacaggagttactggagttggatatgaagttaaacgtcgacaagagtgtttgtatacgattcggggaccaatttgacgcttcatgcacagatatcatgtcagtgcaaggcggccgattactgtgggtagactcgtgtagatacctcggtgtttatttcacatctggtcgtgtgttccgctgctgcttccacaacgcgaaatgctccttcttccgctcttttaatgcaatattttcgaaagtcggacgcttcgcgagtgaacaagtcatcctctcacttttgagaactaagtgcttacctatcctgctgtacggcctcgaagcttgccccgtacttaagagcgacaagcactcattaaacttcacgcttacccgcctgttcatgaagttgttcagaaccggctcaccagcagtggtagcggagtgccaactgcaatttaattttcttccgcttcaataccaggtagatatccgtactgctaagtttctcttccgctttctgaacagtgcaaattcattatgcatcttactgagtgtccatgcgaaagctcaattaaccagtatcctgagttcatacggtgaggatgtgtccagcatatacgacctgcatgtggccatcagtgatattttggtggcctacccatacgatgttccagattacgctctcgagcaccaccaccaccaccactga

SEQ ID NO: 391 - DNA, 2958 bp, synthetic construct
  source 1..2958: mol_type = other DNA
atggctagtgagcaaataaatcttcgggactgtgatagtgcggaaaagttgatcgtcattagctacaatttacacgggttaaaccagggacgtccgggtattaccgagcttatatctctcctctccccggatgctatcatgatccaggagcactggttaactcctgacaacatgtataagcttgaccaattatctgacaactaccttgttttcggctcttcagccatgaacgactgcgtactgtccggtcctttgattggtcgacctttcggtggcaccgctattatcattaagaagagtctggctagcgctactaagaacattatttcgtccgaccgttataacgtagttaagatagccaattggttacttttcaatgtttacatgccctgtgtgggcaccgactatcgggagtacttgtacgtggagatcctgtctgagtttgactctttgttagcagctaatcccaactgtagctgtttggtaggcggtgactttaacacctgccttgacaacccggtgaacgtctctgtgacaattaataccttcatcgcaaacaatatgttacacagatgcgacatcttattccccagtaacaataagttcactttcttcaacgagagtactcactccggaacggcaattgactacatgctggctagtgatcccaacgatattattgcgttcaatgtcttagacatggatatcaacttatccgatcaccacccaataatggcagtttgcgcttgccctaagctttctattgacccgtcgtcatgccagaccaatctgcccgagatccaacactttagatgggatcacgctcagctggataactactacgaacacacacggcgcttattgcaaccagtgtacgatgaattaaacgtacttgcatgctgtcacgtgtccttagacgccatgatagttgcggacaagatagacagtatttataaccggttcgtgaccgcgctgtgtgtgtcagcggagaaattcatcccaaaacaccgaaagaacttttacaaattttggtggtcacaagaattagacgctttaaaagagaagtctatagcatcctgtagaaagtggaaggaagcgggcaagccgagaaatggaccgattcaggcccaatacaagaaggacaaactcttatacaagaagtgcatcaaggaagagcaagccgctgagacatgctcgtttaccaacgaccttcacgacgccctcttgtgcaagtctaaccaggacttttggaagacttggcgtagcaagttttctaataactcaaacaatatcattcaggtagatggaatagccgacggtgcggcgatagcgaacaacttcgctaacttctttgaatcaaacagtaaaccgtttagtgactctcggaacgctgagctcaaggctcagtataccgagttgcgcgcagactactgtggatgtccggttactgacaatgagctgttcgatgttgaacttataggcaaattaatcaccgagatgaagaacaacaaggccgcgggtcttgacgagctcacatgtgaacacttgaagttcagtcatcctattgccatctgtatattaactcagttatttaatctcttcatagctctgtctcacataccatcctcatttggggcaagctatacggtgccaataccaaagtgtgacggacgcacacgggcgatgtccgtagatgactttagaggcataagtatatcacctgtaatctccaaggtctttgagatggctgtgcttgaccgctttgccccttatttcagaacgtcggaccaccaatttggtttcaaacgcaacattggctgccgtgaagcaatctactcagttagaaacgttatcgagacgttcataagcaacggctcaaccataaacgtttgcactcttgacttgagcaaagcatttgaccgcatgaatcactacgcacttcttatcaagctcatcgagcgaaagttgccgttccagcttttgatcgtgttggaaaattggttcttgatcagtataacatgtgttaaatggaacgggcacgtatcgcacttctttcgtctgctgctgggagtcagacaaggcggcgttttatcaccgcttttattcgcaattttcgtagatgacattgttataagagtgaagtccacgcacgctggatgttacatctctttggtatgctgttgtatatttctttacgcagatgacatacttcttgttagtcctactgtaagcggtctgcagatcttattaaatgcgtgtgaaaatgaactgaccgagcttgacatgaagattaacgtgaagaagtctatgtgcatccgtttcggtaagcggtttgacgtccactgtgcggagttggtcagtgttcaaggtggaccgattctctgggtggatagttgccgatatcttggtgtgtacttcttgtcagggcgttcttttagatgctccctcgacgatgccaagtctcggttcttcagagccttcaacgcgatatattccaaggtcggtcatttcgcctcagagactgtgatcttgaatttaatccgtacaaagtgcctgccaatcctgttgtatgcgactgaggcgtgccccttactgtctcgtcagaagcatagcctcgagttcacagtaactagaattttcatgcgcatatttcatacaggatctatggacattgtcaagcaatgccaatgcaactttgggtttctgagtgtttcctaccagttgagtgtccgaaccgcccgttttctccagaaactcgtagcctcagagaatagtctctgcttactgttctctcgcaccgcgtcggatcaactggctaagatcttctctttcttcgatgaggacataaagaccgcatgccaactcaacaactttctttacgagctgctttctgtttccttcaactacccatacgatgttccagattacgctctcgagcaccaccaccaccaccactga

SEQ ID NO: 392 - DNA, 2976 bp, synthetic construct
  source 1..2976: mol_type = other DNA
atggccaccaagtatagcaattgtgcgagtgacaacacatgtaacacacccgtgcatcgcttggtagtcgtttcgtacaatcttcatggttataatcaggggtgtcctgggatcttggaattaatgtcgaagataaccccagacgtgattatggtacaggaacactggttaactcccgataatctccacaagttaaacgacctgtcgaacgattacttcgttttcggctctagtgccatgagtgagcgcgtagcgtcaggtcctctgtatggcagacctttcggagacactgccatattcatcaataataagtacgcttctgttaccacgaatttagtaagccgagatcgctacacagcgataaagatagcaaacttcatgttgattacagtttacatgccaagcgtgggcacagcccaacgcgatttcctgtgctcagagttgctcgccgagctggacgccgttttaagctccaactccaactcaaattcaaattgccagttcttaatcggtggtgacttcaatacgaacttagactcgaacgcgaaagtttcacttgcaattaatgagttcatttccaataattccatataccggtgtgatgagatctttgacgtagcggactcttatacgttctgcaatgaaactgcacactgcttctctacaattgactacatgttgacatcgtgtgcccaagatatcatcgcctttaatgtcgtggatatggatataaacttatctgaccacaatccaatcttaagcgtatgttcatgttgcatcgatacacgaagcgtgaataagaatgaaaagtcagctgacttgtacgctgagttcttccgctgggatcacgctccagtcgacaagtactacgatcaaaccagagttcttatgcagccggtgttagacgagatttcgtcgctggtcataaacagtgcgtacatggataaggaaagcatcgcgattgcatcggactcaatatacgataacttagtagacgctatgcggtcctcagctaatttgttcattccgaagcatcgtaagaacttctttaagttctggtggtcccaggaacttgatgagctcaaagaaaaggcaatcgtgagctgtcgcgagtggaagagtgcgggtaaaccaaagagcggcgtcacgtttcaacagtatcttaaggacaaggccctgtacaagaagagtatccgttacgagcaacagcgggagaagtcctgttacaccaacgacttacatgaggcgttgttacataagaacgggcaggacttctggaaagtttggaagtcgaaattcgaaattgggtcaacaaacacgatcgttgacggtctggctgattccgcggccatcgccaataagttcgcgcaacacttagaatctaactgtcgtccattcaacagcgagcggagtgctgctctcaagattcaatatatcgatcaacgtgcgcaatattgtggcacacccataaccgactgtcaatggttcgatgttgagttaatcgaccggctgactcgtgagatgaagaacggaaaagctgccggtttagatgagatcttttgtgaacacttaaagttatctcacccaattgttgtctgcatcttatcaaagttgtttaatctgtttctgtcaaccggccacataccggcttctttcggggtatcgtacaccgtgccgatccccaaatgcgacgggcggacccgtgccctcactgtcgatgattttcgaggaatttctattagtcccgtaattagcaagctgttcgaaatggcagttttagatcggttctcacattatttcgttacgagtgactaccaatttggcttcaagaagcatttgagctgtagcaacgcaatattttgcgtacgaaatgtcattgagaacttcgtttcacgaggaactactgtcaacgtttgcacgttagatctgtcgaaggcgttcgaccgcatgaaccactatgcactgttagttaagttgatgtcacgcaagatcccagaccttctgttatgtatatttgaattatggttcagcatatcggtgacttgcgttaagtgggataaccacttttcacacttcttcctgctcatagtcggcgttcgccaaggcggcgtgttatccccggtgctgtttgcaatatttattgattcaattgtggacaaggtcaagagcacaaatgtgggatgttacatctcactgatttgttgttgtatcttcttatacgctgacgacattatactcatagctccgagcatccacgctctccagacccttctcaacgcatgtgaggacgagctgtttgttctggatatgtgtgttaacgttaagaagagcgcctgcatacgtttcggtactcgccatgacgcgcaatgttgcgagatcatctcatcgttcggtgggagcatcaagtgggttgaatcctgcagatatttaggcgtcttcttagtcagtggccggaactattcatgcagcttccatgatgcgaagagtcgattcttccgtgcattcaacgctgtctttggcaagatcggccgtatcgctagcgaggaagtcgttcttagtctgcttaaggctaagtgccttccgatcctgttattcgcaacggaagcgtgccctctgctgagccgacaaaagacctcattcgatttcactctgacaagaatatttatgaagctgttcaatacaggctctgcagtgatcgccaaggaatgccagaacttatttaattttctcccgattcgtatgcagttgagtatacgtacagcccgattcttgcaaaagtttgccgcatgtgagaacaacttatgcagcttattcgcagacatagccgtgaagcagctgaacgttcttttctcggagtacaatgtgaagacagcatgtcagttggcgaacgctatatatcggaagctgtcggaaaccctcaactacccatacgatgttccagattacgctctcgagcaccaccaccaccaccactga

SEQ ID NO: 393 - protein, 1057 aa, synthetic construct
MTGEDPQECAKCNYNMIDTKQAVDHCARKHHGMSVQWKCRKCERDWSNIRSIAAHYRHCTGRPPSPVATTATSHVCDQCERAFTGLAGLQLHRKRKHPAAYNESLPRPTGKNRLLGADELTRLAGVELDLGTSKRINLVCHDHFQHRSVDAIATIRKSKRYKDILKVVVETRSLVDEQEAGEGAQAPEPFINIVEAQLRTRFDELEGDSSPAVRDTLAYTRTSLAEGNATIGLDLLSEEVYRPRKAPDSTSNPRKRGPDFAPTTRSQKRRQLYKQIQSLYQRNRKQAVGVILDGDPIQTVFPDVDRADEVFRGRFARPSPPDDKVFNLVPGDTMNMGYITSEEISKCRSAMKKKNAPGPDKEVTMDLVLGLELTVLELIFNTWFALGQVPTAFKEARTILLPKSGDATDPNNWRPITICSLIGRLYAKLLAGRLSKCANLSERQKAFVPVDGCGENTALLSSVIAHAHKVKTQVHIAFLDLAKAFDTVPHTSILRALRRKALPEHFIAIVENLYSDANTSISVGDKSTPSIPMTSGVKQGCPLSPVLFNLVLDELIQNIGTIDGLSVGHSKLAILAFADDLVLISGTKDGLASNLRTCEELFNARSMKLNARKSMTLSLVRAHKRKTMLTDETPHWKVYGEFLPAVKHTEEVKYLGVRYTAGGRPMAKLPKLNDWLQKLKSAPLKPQQRIQIVRSTITSRVIHTLRLCRVHAKLLKNLDRKIRTFIKGVLHLPSGTSTDWFYIPIRMGGLGLQEFMSLIPAAKLKLIDGMKKSQDPTVVDAIRQEHWLKEERWCRAVSSLYGNKEQADRGRVERHISSHTGQTQIGFARLPGQCNWLEGGGKMTGRDYIVGCHMMSNTLSVRTRTFHGGVNRVTTCRYCPGVPETPSHALQSCSKVRDAVTARHNSLLTKIQHFLTPNFDSVIREPWFNGVEGRMNPDLVLIQGRLLYVVDLTVPYDSTIRFMDSQAQRNVDKYQVLEPLLRTKFQVERVKVLGLAVGARGLYTQTGVDIWATLGLTERQRRCVSAMALKQSCLIWGLFTGNRQPQPTLDTGTSAAE

SEQ ID NO: 394 - protein, 1174 aa, synthetic construct
MGSATLYWDIGIALPTKTNKKVARVSLTRNAHSESNKISDSNPSSTIYQIDYPIESESCSLCHEDLPNLNLKIREHINDAHGIVTIRYKCRNCGKEYDTISSIKSHYPACKRKQTNNNLAAAVAKPASTNPQFPVTHQNIPNIPPLQCVECHSKSSSFTAKDRKGLITHMRTKHPQAYEESKKVANIRIAWSNDEDNILANLEISLKSTQKGQILERLFNEWNKLVVQSHANYRSKDAIRARRQQQEYKAILRDLIQKQDDTNASSDDNDSSTDSDSPSIPATICNDMNAIHKLLNDIVIAGHIKLSDHMKNAIDAFLNPNKAIDPVKLTMSGINQSITDIRNKNNNNRNSSRVNGTATAINKKPARNKSRIEKSKQHAYYQRLYLKNKSRLMDEIIDGVAPNVDPPPIHTAIQYYEQIWSILVQDTHPVTTKPDFNNKDNTLLSPITKVEIQWAIKKTKRDSAKGVDQITLQEAKLLAEDDLYIAFNIWLGCKTIPSDLKLNRTTLIPKGKQGLDMITNWRPITISSILLRLFNKIIACRMNKYFEIDKRQLGFRPINGCSMNILWLHHLLKHARLNRRDLYVCLIDVAKAFDSVPHESIFRALVRHHAPSSFVELVRNQYADSYTSITYKNLSSKRIKILRGVKQGDSLSPLLFNLVTDELFGILKDQLGYNITNIGSSNIKCFADDICLISGSRIGMGHMISETVSFLNDRNLQVNANKCMSIGLQKGFKGKKSKIVTEPIFTINGSLIPILGHVENHTKYLGIQFTSVGMVNANVAKDRIIMVLNKLQKIPLKPQQKIDLIRSHVIPLFIYQLINLENYPKLLKEIDILIRRAIRSILHLNIGLSIEFFYLPIRDGGLQIPLLRDIVGLAKVRIYKYIMRSDDELLKHLVQKQAFPILHRFINELKLDSSYETSDIKLRKIQLVKDRRVSYAGKVHGYGSEVFSTCPSTNFWLYGDNKTVTGRTYINGIKLRTNTLETRVTVTRGCMVDKTCRMCKEENESLMHILQFCKTTKGLRYARHNSVCARVVKKLKERGFQVYVEQAYTTDETGLPTLLRPDIIAVKLDHAYVLDVQAVYESSGASFINAYKFKVDKYTPLIQAIKNRHKCKDVTIHGLIIGSRASFHHGHIRIWNEFGFSSSELKYMALNCLENSLRIWSTFNFNRLNSFNRS

SEQ ID NO: 395 - protein, 1162 aa, synthetic construct
MDYNILMRYEGRECIRCECGVVCTTQATIKEHWASVHRVCGLVLVCDKCNKRFVTLLAVSCHFCKCDAVEVESVGPEECNLCGRWFTQGRSMSAHQWKAHPLQWRARKGKAERKRRLDLVEEEDENVGRPYGQERKRARVDEDENAGHPIGEHVEVAGITPGNGEAIGVEVVFPDTQERVQMGVDEDDNTRHPVSEIEEGAGINPGNGEEVDVDAIHSDSQEQMRVDEDENAGHPVSENEEVVGNAPDNGELEVAGVTPGNGDLVDVHLVSQAAGIDEAVGSGLHVGAGIAPSESVEAFRAALRSLVVEGGLSGLVRDAVVNVLNDEGGERIGSVLKDLVQAIGLENATTPGTARRPGHRGGFGRHRHVGNKAASMYAGFQAMMTRNPSEVARWLWEGRAGEEGNVVPPMDHLVRIFGSVMSVDGVEDNEQIASCQEGVKVFYPVTSQDLDKALNKANASAPGLDGLRIESLKRMSGDNKSNAVALVNLALLAFGNYERTVRTVMIPKSTEHLEDADNWRPIAIASHIIRVGHRVLAHRLESQVKLHPAQRGFTRGDGLARNVWLLDAIIKHARVNNRTLCVVSLDIKKAFPSVSHSSIARAVDRFGCSPVFCEYIRSVYRDNATVLQCGKSVSDAILVKRGVRQGDPMSSVLFNMVMDELLCLLDPALGYKFDGTCVKAMAYADDLVLVARSVGAMKKLLTGTEEFLLKRGLMLNEKKSVALHLRRGKRAVVLSLEEVWSLREGAIGMVSEIKSLTYLGVRFGPYGKMNYDTKPLSDALGRLCRAPLKPDQKLLLLKTHLLPKALHSLTLGCCDKKLLKTLDMRVQHAVRSILHIKKDVPCAFIHGPSKHGGLGVMSFVADVPRHVCNRIEGVQLAGEGGEMRALVDSFYFESILRKLRTPATQVPDEYVAHLSRKNCRRNMSVRLKQADMSSKYDTRGITEVAEHGDSRAWLASKPVFWPARTYVNAVQWRCLSITCRSRVSHGRAGDRLCRTGCGKIETAFHISQVCPSTHLARVARHDRIVQLIKRSAESKGHAVVVEPRITTAAGIRKPDLVIANARSKTVFVVDVHVAWKGLRQAFDAKVKKYGRHKEISDFGRTLLPEAERVQFGAIVVSPRVIWAGANEQVVNGLQLPHGIRKVVLASCVEGTMKILSAFNAVQ

SEQ ID NO: 396 - protein, 1056 aa, synthetic construct; identical to SEQ ID NO: 8

SEQ ID NO: 397 - protein, 1396 aa, synthetic construct
YFHVVRPGCRSNRSGGKAFCPSALGGVYIPSAVVFAHIIVLSMAESNYSVSLVEGATAPSSATACTSVGDDCPSSVPFPDHSCFCEVCGVAFGSDSGLSLHQRAKHGEWYHQRRLPVFVRPGWSREEIVLVARAEIRLVWAARQSGMGEGRIRVNADLCRQFVNRKMDAIKYIRQTKGYKELLRKLEITMAEEGAEERELAPDGDTHLHQVMYGNWEQSQVVKHPRFVELPSKTVKQPVSVTETSESVPVGPVGEASGVVDGSKEGEDGVASPIRPQVVQRMWVTPEEKSRKGPKVRWGHELMIEVAREEQRLAGAFKMNVELHKRFPSRTLEAIKNMRRQDKYKALVKSLPAPHLVVTPPGPSEPQEGTPPQEVVSEENVGSSPQNVCTPLNVLCLSNEGIRPQIDCTMLPDDVSLNEVTMCEESFSIGGFGVDTPPRRIDGTDEGREKKKEDENDARDVSEPEPPSQACNPPQGDVSQAVGDVGGRTVDGQVGDSDQFDQGRDGGVGVETEYSSWKESLLEELVCAQGYLAGMDSLEFMDFRPGQLSREHREMLDIEYQRWVELELGSSHRRKGPRRRARRREAAGRKEAAGPAEAGGRRKRRRTEYARVQKLYRSNRSECSRKVLSGEWRSEETPSIPLEDQVVFWSRVFGEESVPDTRTVRPQGMVLWGLVEPITVDEILSTLRNTKDGAVGLDKISRKDISKLNPRALQAHFNLWLYAGYQPIEFRRSRTVLIPKVPEPSGPGQFRPIAIGSFISRVFHRLLAERLSGLLEFQSRQRAFIKGDGIADNVFLLRCLLRDTCEEVKPLSLAFLDVSKAFDSVSHATLLLAAERMGAPGPFISYLRTLYSEASTVLHVDGRFSDPLMQNRGVRQGDPLSPLLFNCVIDWALASLDPEMGKVVGGGPRLNHLAFADDVVIIAESVVGLQHLCGQFERSLGRCGLTLNVDKSRTLRIATDGKAKRWVCDPTPFVSLAGGLMPAVSIAHAYKYLGVHISARECDSTPEEILTRGLNQLKAAPLKPQQRLYMVRTHLLPKLHHKLVLSRTRGGVLNRLDRLVRRSVRLWLNLPHDACNSYIHSEVKHGGLGIPSLRLTIPFMKSARLRRLAALRDPVFVALVASSRTFAEEVKRCADPPVRVGDTIVTSVPAAKEALAEQLHSSADGYGLRSSAGVPYVHSWVSDGTALMSGSAFIHATQIRGATVATKKRSARGRPEANTACDCCGRPETLGHVLQVCHRTWGSRIKRHDALMEKFLQALEIRGGSIVRAPVIPVVGGSPQKPDGVIYFQSHCWVVDASVVADNADLDNAHLSKCAKYDTPTVRDWCQSNWPSHMGGHGIVRFGALIFNWRGVMSRLSARMCDLLNVNRTVQKVMAVCVVEHGWSMYREFHRSTAWR

SEQ ID NO: 398 - protein, 1073 aa, synthetic construct
YAINQALVKVTAGRTLEAIKSHRKLPAYRQMVRSYLRTTGGLIVDEAVVPARIVAEVTGGATSGPQDDNSRQGDDRSSPVATRVAEVRSPGPQPATLAVAAGPAGPTGRSNDRNMTDNQITTMADVHQLHTGRIPSGAICPPDGKHKRKVTPRPEARVETRPLSPIISRWSDEETDSDPLPDTQNINTPVREEIERASHGIAEGMAGEYDWRAPVKTELLNLATDANICPELLHEVLLSPCGDRELLQELIDVDLLGFFPPAERPRRNVRRRPEQQAPVTSRAKRRAAYSRVQALYKKSRTSCARTILAGKWREVAPSVELREQVAYWKTLFEHESQEDSREPPAEGAPEWEIVNPVTKDEVARHMRGLKDGAAGPDGKLRKHLKGLNTGALAARFNLWLLAGMAPDAFREGVTVLIPKSNDSTLPQDHRPITLGPILCRLYHRILAERVERHYRISERQKAFRRGDGLAENCYILRTVIDDRKARCQATNIAFIDVSKAFDSVSHESIFLAAASAGIPDPLVDYVRSVYGGLRTRIRANGELSEVIAVNRGVRQGDPLSPVLFNAVIDLALRHMDPEIGVKVDSERLSCLAFADDLVLLASTPQGLQKQFSGVERALCRSGLALNVGKSATLRLDVHGKRKRWACNPVGFLKCRNGGTMRAMSITDGYMYLGNTVSAGVASEKSVLILKAGIKELTQAPLKPQQRMYILRNNLIPSLMHSAVLGSISKKSLKFLDTMTRAAVRSWLRLPRDAPFGYFHADFRDGGLSVTPLLWTVPLLRTKRMTKLVASPDPVARAVSRLPIFARERNRWSRPLSAYGLPIRDAVGIKRAMAEGLHTSVDGRGLNGSFASGHVNAWMTSGTARMTGSGYVNCIRIKGNLPYTRARAARGRPEKPIRCDACNEVESLGHILQRCSRTHQPRNDRHDKINKFLNQSLKKLGFQTQVEPPIPTTQGVRYPDLVAWRDGRCVVIDTTVVADNRNPDEAHARKATYYDTAGVRKWCADKSGVPVKDISMSACALTWRGIPSQRSVRELSTLGITKSHWQVMSIQALEGSVKCYAHFFHSTSGTRAVP

SEQ ID NO: 399 - protein, 768 aa, synthetic construct
AHYRHCTGRPPSPVATTATSHVCDQCERAFTGLAGLQLHRKRKHPAAYNESLPRPTGKNRLLGADELTRLAGVELDLGTSKRINLVCHDHFQHRSVDAIATIRKSKRYKDILKVVVETRSLVDEQEAGEGAQAPEPFINIVEAQLRTRFDELEGDSSPAVRDTLAYTRTSLAEGNATIGLDLLSEEVYRPRKAPDSTSNPRKRGPDFAPTTRSQKRRQLYKQIQSLYQRNRKQAVGVILDGDPIQTVFPDVDRTDEVFRGRFARPSPPDDKVFNLVPGDTMNMGYMTSEEISKCRSAMKKKNAPGPDKEVTMDLVLGLELTVLELIFNTWFALGQVPTAFKEARTILLPKSGDATDPNNWRPITICSLIGRLYAKLLAGRLSKCANLSERQKAFVPVDGCGENTALLSSVIAHAHKVKTQVHIAFLDLAKAFDTVPHTSILRALRRKALPEHFIAIVENLYSDANTSISVGDKSTPSIPMTSGVKQGCPLSPVLFNLVLDELIQNIGTIDGLSVGHSKLAILAFADDLVLISGTKDGLASNLRTCEEFFNARSMKLNARKSMTLSLVRAHKRKTMLTDETPHWKVYGEFLPAVKHTEEVKYLGVRYTAGGRPMAKLPKLNDWLQKLKSAPLKPQQRIQIVRSTITSRVIHTLRLCRVHAKLLKNLDRKIRTFIKGVLHLPSGTSTDWFYIPIRMGGLGLQEFMSLIPAAKLKLIDGMKKSQDPTVVDAIRQEHWLKEERWCRAVSSLYGNKEQADRGRVERHISSHTG

SEQ ID NO: 400 - protein, 520 aa, synthetic construct
NATIGLDLLSEEVYRPRKAPDSTSNPRKRGPDFAPTTRSQKRRQLYKQIQSLYQRNRKQAVGVILDGDPIQTVFPDVDRTDEVFRGRFARPSPPDDKVFNLVPGDTMNMGYMTSEEISKCRSAMKKKNAPGPDKEVTMDLVLGLELTVLELIFNTWFALGQVPTAFKEARTILLPKSGDATDPNNWRPITICSLIGRLYAKLLAGRLSKCANLSERQKAFVPVDGCGENTALLSSVIAHAHKVKTQVHIAFLDLAKAFDTVPHTSILRALRRKALPEHFIAIVENLYSDANTSISVGDKSTPSIPMTSGVKQGCPLSPVLFNLVLDELIQNIGTIDGLSVGHSKLAILAFADDLVLISGTKDGLASNLRTCEELFNARSMKLNARKSMTLSLVRAHKRKTMLTDETPHWKVYGEFLPAVKHTEEVKYLGVRYTAGGRPMAKLPKLNDWLQKLKSAPLKPQQRIQIVRSTITSRVIHTLRLCRVHAKLLKNLDRKIRTFIKGVLHLPSGTSTDWFYIPIRM

SEQ ID NO: 401 - protein, 615 aa, synthetic construct
RPINGCSMNIQWLHQLLKHARLNKRDLYVCLIDVAKAFDSIPHESIFRALTRFKASSSIIELIRDQYTNSSTTIVYKDLSSKRIPILRGVKQGDALSPLLFNLVIDELFEVMKDQFGYNIANIGSTNIKCFADDMCLISSSKSGMGFLINEATTFLENRGLQINANKCMTIGLAKAYKGKKSKIITESTFNIHGTPIPMLGHVEHTAKYLGIYFTSVGSVKAIVTKSNIEIVLDKLQQIPLKPQQKIDLIRSYIIPRFIYQLINLEVYPKLLKQIDLLIRRSIRSILHLHQSLSIEFFYLPVRDGGLQIPLLRDIVGFAKVRIYKQIMNSNDAVLQYLMESQGFPIIHRFLNELQLSSSFETNDIVVRKNQLMRDKRVSFGNKVHGQGYEVFSTCPMTNFWLYGDCKTMTGRSYINGIKLRSNTIETKVTLTRGMSVDKSCRLCNNEYESVMHIMQFCKGTQGLRYKRHHYVCNRVINKLKERGFVVFSEKAFMADTTGLNTLRPDIIAVKNNHAYLLDVQCVYETSNASFINAYNYKVQKYTPLVQAVKDRHCCVEVTIHCLVIGSRGSLYHNHLSIWYSLGFTSSELKYLSLNCMENSLRIMSTFHESVKNNR

SEQ ID NO: 402 - protein, 1187 aa, synthetic construct
MTSSQSCSQPVCSRSKPSDTTVLSDFQSQPTRKRASAKQKDSQSSETRSCVSKKDTTLWNDDLVSQLLEIRKMVVPDPNCKVAPYGSWKRIHQIWKERKLPNMTEQQLRQKWTQLNRKKNVDKLVNQTEEMNSEVHNLDENEKIRMSDLYKKLEPLIIDPNNFTLPIESRTSTRMKRIPSSSDLKVLNLLFSDLYPRIENLFHDKLLAIDTLLYTIVHKYKSIKEPMQQAIYDKKEQDLINAIKNITRKLRPLYAAMHRMRNGVKETSQKIVQQIVEEYKTFDLKSLTTKIGMMKQERNRYKRILSEYKKRKKFFRTNEMFMVNEKKFYSMIENRNKTKRETPDEKEVVQFWSSIWERKKSCNLDTAWIKEISKKLEEKLSLVDKENTRNSRKLKTKTANNLKQVNSIFNLNISHIFKSIHKKKNWSAPGPDMICNYWWKYIDSTWPKLLEAFQQMLNNTVPIPEWFCAGVTYRIPKQGPPCEANIRPITCLNTVYKMFTSIVLSYLSAYLDQHNLMTIEQRGAKKGVWGTYENLLIDEIISQDANKHRNKSFSAAWLDITKAYDSIPHEWIMKCLEIHKVPNEIKAVIRQLMEKWSTRIYYDFQKKTRTIQIKNGIFQGDSLCPFLFCLALNPISILIKSWNCGYKLNSADMVITHSMFIDDIKLYSTTQDKMNGILSLLKSALSDIGLSINDKKSGTLIRCKGMISEQGVKLQDGTSFPAITKTNLYRYLGFMQSLGIDKEKNKEMVINEFKERVERLVNSSLSGFHLARAYNTYCIGYLRYFFFMKWNYYELNRMEQILKKSLKQKGLFFRGFPVALFHLPRDKGGRGFQSVFMEYLIYRIGLAFKFHKSPHMERITNLLRDKDCDSFYNDTLTYGKEFGLQFEFQKNQNIIIKDSETKEELNISSKKKLTQLLRDRANKKWLTEAEEGGMHFKFWNMYKERLSWIKNWRFITKQCENMLWMAMTANLQTRSLTKWYNTQHSNGLKQQNNIKCRLCGKANETTEHIVSGCSALMNSDIIPRHNSVLYHLLRMILDRNGIQHNGTVQMEYSTDKVRIQCNCKILTIREVEHNVPDLVVYLHERKQIQIIDIAVPYDDNLEMRYNEKIQKYGPLQIELQKLNPGYKATVIPIVIGAFGVTLPSFQENLKKVLGENCLYEAKKLIRAAISGTFLILTKWESRAKIVD

SEQ ID NO: 403 - protein, 978 aa, synthetic construct
MDNCNIITYNMHGFNQGAELVKSYCSNALSDFMLLQELWLSSDSLYKLDNIAHGYSCFSVSSMDSVLENGLLRGRPFGGLAILVRENHRNLCSLLASNERLIAVVYNDILIINVYFPCSSRLNYKDETLDLLVQIEELLGCFVGDKVVIGGDLNCTLEIESWSSKLIRGFIDDHNFISCNNLPIDVTGTVYTYSNEVLGHYSYLDYFVVSNNLSLSIVSLKIGCDELNLSDHSPVSMEAKNIINVDYKKSNSSCNKGDLIPETCYHNRWDHADTVGYYESTRVGLQPVLEDLRSCLTNLKTVNVSNTKQRMKESIDSVYITILAVLNDAAYRHVPRIKANILKFWWDQELSDLKSKAMASNKVWIEVGRPRSGYIFDVRKADKYKYKSLIKRKQLEIRNNITNDLHDALVQKDTEDFWKVWKSKFPNKKVNKFPLIDGSSDPNIIANKFVDFFSNVCTSEPLAYKNANNDFLNRLQDFRGDSTSNTDTVSVELLEEVLESMSRGKAAGLDNLTIEHIQFAHPIIITILKELFNCFLEVGMVPDGFRDGLAIPLPKNDNASHNVNVDNFRCITISPVISKLFEHCLLRLFSKYFHSNDAQFGFKKKLGCSHAIYSVKQVVDYYVRGGSTVNICTIDISKAFDKVNLFILLGKLMDRNIPNCVIMVLFDWFTNSYITVKWLNVLSLRCQVNSGVRQGGVMSPVLFAIYVDEILDKLNNSGLGCNVKGLTVNSFMYADDLIILSASVTHLQKLINICVDELKSIQLSVNAKKCFCMRIGKRYAVSCNSVVIDNYHVQWTNEIRYLGVYFTAGHLLKFNFVPYKRRFYRCLNCILNKTGIKAINVVLSLTQSYCVPFLLYSVESTNLTATEKLRLASPFKMLFSRLFNSFDAQTITYCQYYTGYLTLEFVIDQRRLKFLNNICNLNNVVIHSLFRLNGATEISSLIAKSRMIAKYNTNMFDIKSIKYSMWNSFILVNNLGVK

SEQ ID NO: 404 - protein, 745 aa, synthetic construct
DLNLSDHSPVRIDLSNIISTNCKYPNTEKPYTKSCYQNRWDQADVVGYYESTRLGLEPILTYLRSFSKYSGTPNDSDAIRECIDSTYNSIISVLNNAAYQHVPRVKANVLKFWWDQELRELKDKAIASNKVWIEAGRPRNGLIFETRKGDKYKYKSLIKRKQLETRENITNDLHEALLNKDNDGFWKTWKSKFPPKKTNKYSLIDGSTDPSEIAEKFGNYFSSICTSETSVYNSSKNVFLERLGEYIGYGDHNNDYITSVELLEEVFESINNGKAAGLDSLTIEHIKFAHPIIVTILKELFNYLLEYGVVPEGFRNGLAIPLPKDDISGSKIGVKIENFRCITISPVISKLFEHCMLRLFSKYLQSNDAQFGFKKKIGCSHAIYSLKQVVDYYVRGGSTVNLCTLDISKAFDKVNLFVLLGKLMDRKSPNCLINVLFDWFSHNFITVKWLNVLSSSFQVNLGVRQGGAMSPVLFAIYVDDLLVKLNSSRLGCTVKGLTVNAFMYADDLIILSASVTDLQRLINICVDSLTTIQLSINAKKCFCMRIGKRFSVDCNNVIIDNYPIQWCSTIRYLGVYLMSGHVIKFNLDYCKKRFYRCLNSILSKTGTKVIDILLSLTHSYCIPVLLYATESMSLTVTEKQRLASPFQRLYFKIFSTFDPQTIAYCQYYTGYLPLNYTIDLKCLKFLTNIANTTNVFLNLLFSLNGTTSIKNVCAKYNTNKMDLISVKNAMWNVFIQVNMLNFCSS

SEQ ID NO: 405 - protein, 976 aa, synthetic construct
MMQMMQLIMFMQLTLFKMAEKLTIISYNLHGLNQGKPGIDEIISKIEPDLIMVQEHWLAPDNLGKLNSLSSKYFVFGSSAMNLVVSSGPLCGRPFGGTAILINNYHVSSVVCITTSDRFTAIKLYNWLFITVYMPCVGTAQRDELYLNILADLQAIISDHSECHCFIGGDFNIDLNSQSNSNISLTVNEFSEYHSLSRCDELFSVGNKNTYINESNNTSSTIDYMLATDCDRIIAFNVLDIDINLSDHVPILAICACDVSPIPLCEATKSKCSAKVSHLRWDHAPLELYYEHTRQLCEPVLNSLISLIACRPADAATDAFIVDSVDQCYTSLVNILRESANLFIPKHQKNYYKFWWSQELELLKQNAIASCRAWKDASKPKHGVLFFKYKQDKLLYKSRIREEKAREHLSYTNNLHGALLDKSGPNFWKVWKSKFENNSTKVIQVDGTADNALIADKFAKYFESNCTPFSAVRNEELKIEYNHRRSSYNGSPIIFSQLFDVELLSNLIDKMDNGKAAGLDDLSSEHLKYCHPIVICLLVKLFNLFITLAHVPDSFGKSYSVPIPKCDGHTRALSVDDFRGISISPIISKVFELAILDKFSRYFTTSDHQFGFKKRVSCRHAIYCVRNVIEDFINNGSTVNMCALDLSKAFDRMNHYALLNKLMDRYLPIEILSIMESWFSFSVTCIKWVSHVSPFFTLLAGVRQGGVLSPVLFSIFIDDLILKVIKTNLGCHISNNCVSIFLFADDILLLSPTITGLQSLFNTCERELEKVDMRVNAKKSMCVRFGLRFDAPCIELNSIHGDSLKWVSNCRYLGVHFTSGRVFRCSYDSAKSSFFRAFNAIYSKVGQTASEETVLALLRSKCLPVLLYATEACPMLVRDQKSLEFTVTRVFMKIFRTGSSTVIAECQRNFNFLSIQRQLTIRTAKFLQAFTASDNQLCVLFKSNATHQLNIILSSVSVESIGQLISVLYDQLYCLQ

SEQ ID NO: 406 - protein, 972 aa, synthetic construct
MDNCNIITYNMHGFNQGAELLKSYCSNALSDFMLLQELWLSSDSLYKLDTIAQGYSCFSVSSMDSVLENGLLRGRPFGGLAILVRENHRNLCSLLDSNERLIAVVYNDILIINVYFPCSSRLNYKDETLDLLVQIEELLDRFVGDKVIIGGDLNCTLEIESWSSNLIRGFSDDHNFISCNNLPIDVTGTEYTYSNEVLGHYSYLDYFVVSSNLSSSILSLKIGCDELNLSDRSPVSMEAKNINNVDYKKSNSNSNKGDQISETCYHNRWDHADIVGYYKSTGVGLQPVLEDLRTCLTNFKSVNVSNTKQRMKDSIDSAYNTILAVLNDAAYRHVPRIKANVLNFWWDQELSDLKSKAMASNKLWIEAGRPRSGYIFDVRKADKYKYKCLIKRKQLEIRNNITNNLHDALVQKDTEDFWKVWKSKFPNKKVNKFPLIDGSSDPNIIANKFADYFSNVCTSEPLAYKTANNDFLNRLQDYMGDSTSNKDIVSVELLEEVLESMSRGKAAGLDNITIEHIQFAHPIIITILKELFNCFLEVRMVPDGFRDGLAIPLPKNDNASHNVNVDNFRCITISPVISKLFEHCLLRLFSKYFHSNDAQLGFKKKLGCSHAIYSVKQVVDYYVRGGSTVNICTIDISKAFDKVNLFILLGKLMDRNIPNCVINVLFDWFAKSYITVKWLNVLSLRCQVNSGVRQGGVMSPVLFAIYVDEILVKLNNSGLGCNVKGLTVNSFMYADDLIILSASVTHLQKLINICVDELNSIQLSVNAKKCFCMRIGKRYAVSCKSVVIDNYHVQWTNEIRYLGVYFTAGHLLKFNFVPYKRRFFRCLNCILSKTGTKAINVVLSLTQSYCVPFLLYAVESTSLTATEKLRLASPFKRLFSRLFNSFDAQTIAYCQYYTGYLPLEFVIDQRRLKFLNNICNLNNVVIQSLFRLNGDTEISSLVAKYNTNMFDIKSINYSMWNSFIIMNNLSVE

SEQ ID NO: 407 - protein, 416 aa, synthetic construct
GPVRHRCTWWWSEDVRAAVEEKRLAYRKWLQSRLDEDLARYRVARRKAKRCVAKAQAGEREKWRASLSEPAGQKRVFAMARRMAREGRDVSGVPCVRAESGRVIVEGDEMKEVWARYWSRLLNEENPWDGGQGSAPVEGPELSVSASEIEFALRAMKRGKAAGPSGLVAEMLVAGGPFLNGWFTSLCDLIWRTGEIREDWALSVLVPVFKGKGDPLSCGSYRPIKLMEHGMKVMERVLERRLRAVVSVDGMQCGFMSGKSTTDAIFLVRQLQEKYLDKRRSLWCMFVDLEKAYDRVPRELVRWALRLKGVTEELVRVVMPMYVGSHSLVRTSVGETRSFDVGVGLHQGSVLSPLLFAVVMDEVVREVKVGMPWEVLFADDLVLLAQTRELFARYRAWKNAMMGSGLKVNVVKTKVV

SEQ ID NO: 408 - protein, 740 aa, synthetic construct
MREEMEKFQQLTFMTMDANKLQIVSYNCKNFHTDGDKFIFVNSLFSNTQFLLLQETWLYESEFKKLLNIGINSEHIATSAMNESKHRIGRKFGGTAIVWESSIKGKITKIDLQHERICALLFTKDQYSILIANVYMPCDNHAGDEEYTNVLNVISQCLYKYNPSHIIIGGDMNVDFVRNSPNTHILFDFITDFKLVKCIDFPCASVPYTYINHSGMTSRIDHFFISESLKKSITYCDIVDNHLYSDHVPLRVVLDIDIQHIIDVRERPFTIKKAWHRANDQDIVKYKDNLDSLLSDLVIHDSILHCNNYNCLLHREELCTLYEAVINACIKASEHIPNTSGSARKVKPGWNDEVKCLREDALSWHHFWNINGRPRDGYVAEMHRITRARYHRSIRQLKRDHDKLRMEKMADSLLSDNSRDMWAEIRKMKGNSSKMACSIDGCYDNDEIVNVFSDKYMSLYNSVPFDSDEMCSIKSEISARIDKCNHGYSISTEDIVNAVTHLKCGKSDGAEGLYSDHFIHGTGRFYVILSLLFTLFLSHGFSPESMIIGTMIPIPKDKKKSLSNSSNYRAIALSSIFSKILDWIILIKEQKSLFSSELQFGFKKGLSTTQCTNSMLETIDYYNFNKSSVYVLLLDANKAFDRVNYCKLFDELLKRDLSPLVLRLLLYMYTNQTLRVRWGHTMSDSFGVSNGVKQGDVLSPLLFAIYTDGLLVRLQETGVGCHMGHRFSGALANADDLTLL

SEQ ID NO: 409 - protein, 977 aa, synthetic construct
HFHDSGENLTFIDTLMCDTNFLFLQELCLYENEFEKLLNLSNNCDFTATSAMDEKVHRIGRPFGGTAIIWNSSITGHINKVECDNNRICGLLYIMNNVTMMLLNIYMPCDKYTDDFEFIDVLNTISQLLHKHNPSHVVIGGDMNVDFIRTSPNTRVLSDFITDFNLYTCIDLPDSNVPYTFINHNNNTSRIDHFLVCESLKDAISDCYIVDNHLFSDHVPLNICFNLDVTYIAEVERPFTIKQAWYKATDFDIEKYKKRLDGLLENIIVNDSMLYCSDYNCIDHKEELCELYNTVINTCITASDHIPTTSNRTKIKPGWNDNVKQLKEDALSWHHFWKINNRPRAGYVAEMHRISRARYHRAIRHIDRNASKIKSEKIAEAMLSNNSRDMWSEVKKMKGRNSKLTCSIDDCSDSNDIANIFSSKYMELYNSVPYDVDEMKKIESRIMDRIDDCSDDNYSISVRDVIDAVARLKHSKSDGSEGLFSDHFIYGTNRLFVILSLLYSLFLSHGFSPDSMILGTMIPIPKNKKKSLSHSSNYRAIALSSIFSKIFDWIILIKEHSSLCSSDLQFGFKKDTSTTQCSYSMLETIDYYNFNRSNVYVLMLDASKAFDRVNYCKLFNELLKRDISPLVLRLLLYMYTSQCLRVKWGHTLSDCFTVKNGVKQGGVLSPILFAIYTDGMLQKLESTGVGCHMGSHFTGALAYADDITLLSPSISGLKILIEVCEQYARDFDILFNGNKSQLLFYRGRGCVSCYKDIVVNEQCVKYSNSAVHLGHVISPDDKDCILRNAKANFWKKFNIFMSDFGNLSCYVKSKLFQQYCCSMYGSPLWSLRGSAVQSLCVAWRKALRSLWRVSPRTHCDLITALSFQIPLHSNLTKRFAKFIIKCLGSENRIVNIISHIAIRNPLSCAGNNYRDLLDRNSEVDFKTLLFNWNERADTIENLVRTLHELIEMRDGLKECIGLTFDEIELFITDICIH

SEQ ID NO: 410 - protein, 975 aa, synthetic construct
MSLTMPANNNLFNFTTVVCNTDVTSKLVIISYNLHGLNQGLHGLRELISKCNPDVLCTQEHWLTPANLYKLKSISSAYSAYGSSAMSDTVSRGPLVGRPFGGTAILVKKKFDSATSNIVCRDRVTSICILDWLIVNVYMPCAGTVDQLLLYSDTIDYIDSVLFECPGHNICMAGDMNTDLNVFSPISDLVNNFLLRNKLHRCDILFPVSLKYTYMNESLNCSSTIDYMFTSSVYVTVAYNIVDLDVNLSDHVPLISVCLCRPLVQSRDDTIKCPVDVEHFRWDHAPTHLYYEQTRMLLQPILDDVNFLLCTNDTDGKFEINSTNIIYDKIVQALQESANKFIPKRRKNFYKYWWNQELDELKDKAIASCKLWKEARKPRSGPISVKYKQDKSNYKLGIKRAQNADVSFYSNELHDALMRKNGREFWKVWNSKFTKSSDGHLLVDGLSDCAKIANKFADHFKMVCQPFSEKRSTELKAMYDSARANYVGQSIIDDQRVFDVQLISEKIMQMKSGKAAGLDKLSAEHLMYCHPIISVILCKLFNICMLSGHVPSGFGASYTVPIPKVEKSCRSLTVDDFRGISISPVISKVFELCLLDRYQDHLITSDHQFGFKHSIGCRHVIYNVRKTVDHYVNNGSTVNICSIDLSKAFDRMNHYALFLKLIKRGIPLALLSVMEYWFKLSVTCVRWCGYESPFFRLLAGVRQGGVLSPLLFSIFIDDIVYRVISTKVGCYISHVCVSIFLFADDILLLAPTLFGLQKLLSACEDELEFIDMHLNAVKSVCMRVGARFDASCASIYTHLGVALKWVETCKYLGVYMVSSKTFNCVFDEAKRKFFRAFNALYGRVGRSASDEVVVSLIKAKCLPIMLYGAEVCHLTKYQIRSFDFSINRLFMKIFKTGSISVVHECQVNFNFISVGYLIDIRESKFLYDFSNVNNYICQLFTKHANYRLSELYSLYGVSTVGQLRVAAQIAFASDC

SEQ ID NO: 411 - protein, 330 aa, synthetic construct
NGKAAGLDGITSEHLKNNHPCLVVILCKLFNLFILTGRFPVSFATSYTVPIPKCDARSKSLEVNDFRGISISPVISKLFELCVLERYCDYFATSDHQFGFKKNLSCSHVIYSVRTVVENFISNGSTVNLCCLDLSKAFDRMNHYALFIKLIKRKFPLEILKLLEYWFCMSKTCVRWDGQMSYFFAIVAGVRQGGVLSPVLFSIFIDDIVHKVKSANVGCYLSNVCVSIFLYADDILLIAPTVTGLQTLLTVCEQELFELDMKLNVTKSVCIRFGEKFDSLCSDVVSAQGGKLLWVDSCRYLGVYFTSGRVFRCCFHNAKCSFFLSFNAIF

SEQ ID NO: 412 - protein, 958 aa, synthetic construct
MDNCNIITYNMHGFNQGAELVKSYCSNALSDFMLLQELWLSSDSLYKLDNIAHGYSCFSVSSMDSVLENGLLRGRPFGGLAILVRENHRNLCSLLASNERLIAVVYNDILIINVYFPCSSRLNYKDETLDLLVQIEELLGCFVGDKVVIGGDLNCTLEIESWSSKLIRGFIDDHNFISCNNLPIDVTGTVYTYSNEVLGHYSYLDYFVVSSNLSLSIVSLKIGCDELNLSDHSPVSMEAKNIINVDYKKSNSSCNKGDLIPETCYHNRWDHADTVGYYESTRVGLQPVLEDLRSCLTNLKTVNVSNTKQRMKESIDSVYITILAVLNDAAYRHVPRIKANILKFWWDQELSDLKSKAMASNKVWIEVGRPRSGYIFDVRKADKYKYKSLIKRKQLEIRNNITNDLHDALVQKDTEDFWKVWKSKFPNKKVNKFPLIDGSSDPNIIANKFVDFFSNVCTSEPLAYKNANNDFLNRLQDFRGDSTSNTDTVSVELLEEVLESMSRGKAAGLDNLTIEHIQFAHPIIITILKELFNCFLEVGMVPDGFRDGLAIPLPKNDNASHNVNVDNFRCITISPVISKLFEHCLLRLFSKYFHSNDAQFGFKKKLGCSHAIYSVKQVVDYYVRGGSTVNICTIDISKAFDKVNLFILLGKLMDRNIPNCVIMVLFDWFTNSYITVKWLNVLSLRCQVNSGVRQGGVMSPVLFAIYVDEILDKLNNSGLGCNVKGLTVNSFMYADDLIILSASVTHLQKLINICVDELKSIQLSVNAKKCFCMRIGKRYAVSCNSVVIDNYHVQWTNEIRYLGVYFTAGHLLKFNFVPYKRRFYRCLNCILNKTGIKAINVVLSLTQSYCVPFLLYSVESTNLTATEKLRLASPFKMLFSRLFNSFDAQTIAYCQYYTGYLPLEFVIDQRRLKFLNNICNLNNVVIHSLFRLNGATEISSLITKSRMIAKYNTNMFDI

SEQ ID NO: 413 - protein, 840 aa, synthetic construct
QIEELLGRFVGDKVIIGGDLNCTLEIESWSSKLIRGFIDDHNFISCNNLPIDVTGTEYTYSNEVLGHYSYLDYFVVSSNLSLSILSLKIGCDELNLSDHSPVSMEAKNIINVDYKKSNSSSIKGDLIPETCYHNRWDHADIVGYYEFTRVGLQPVLEDLRSCLTNLKTVNVSNTKQRMKESIDSAYITILAVLNDAAYRHVPRIKANVLKFWWDQELSDLKSKAMASNKVWIEAGRPRSGYIFDVRKADKYKYKCLIKRKQLEIRNNITNDLHDALVQKDTEDFWKVWKSKFPNKKVNKFPLIDGSSDPNIIANKFVDYFSNVCTSEPLAYKNANNDLLNRLQDFICDSTSNKDIVSVELLEEVLESMSRGKAAGLDNLTIEHIQFAHPIIITILKELFNCFLEVGMVTDGFRDGLAIPLPKNDNASHNVNVDNFRCITISPVISKLFEHCLLRLFSKYFHSNDAQFGFKKKLGCSHAIYSVKQVVDYYVRGGSTVNICTIDISKAFDKVNLFILLGKLMDRNIPNCVINVLFDWFANSYITVKWLNVLSLRCQVNSGVRQGGVMSPVLFAIYVDEILVKLNNSGLGCNVKGLTVNSFMYANDLIILSASVTHLQKLINICVDELKSIQLSVNAKKCFCMRIGKRYAVSCNSVVIDNYHVQWTNEIRYLGVYFTAGHLLKFNFVPYKRRFYRCLNCILSKTGIKAINVVLSLTQSYCVPFLLYSVESTSLTATEKLRLASPFKRLFSRLFNSFDAQTIAYCQYYTGYLPLECVIDQRRLKFLKNLCNVNNVVLQSLLRLGGASEISKLLEKYNIVNNDNKSITYAIWNSFILENNLCVDH

SEQ ID NO: 414 - protein, 837 aa, synthetic construct
MPCAGTVDQLLLYSDTIDYIDSVLFECPGLNLFMAGDMNTDLNVFSPISDLVNNFLLRNKLHRCDILFPVSLKYTYMNESLNCSSTIDYMFTSSVYLTVAYNIVDLDVNLSDHVPLISVCLCRPLVQSRDDTIKCPVDVEHFRWDHAPTHLYYEQTRMLLQPILDDVNFLLCTNDTDGKFEINTTNIIYDKIVQALQESANKFIPKRRKNFYKYWWNQELDELKDKAIASCKLWKEARKPRSGPISVKYKQDKSNYKLGIKRAQNADVSFYSNDLHDALMRKNGREFWKVWNSKFTKSSDGHLLVDGLSDCAKIANKFADHFKMVCQPFSEKRSTELKAMYDSARANYVGQSIIDDQRVFDVQLISEKIMQMKSGKAAGLDKLSAEHLMYCHPIISVILCKLFNICMLSGHVPSGFGASYTVPIPKVEKSCRSLTVDDFRGISISPVISKVFELCLLDRYQDHLITSDHQFGFKHSIGCRHVIYNVRKTVDHYVNNGSTVNICSIDLSKAFDRMNHYALFLKLIKRGIPLALLSVMEYWFKLSVTCVRWCGYESPFFRLLAGVRQGGVLSPLLFSIFIDDIVYRVISTKVGCYISHVCVSIFLFADDILLLAPTLFGLQKLLSACEDELEFIDMHLNAVKSVCMRVGARFDASCASIYTHLGVALKWVETCKYLGVYMVSSKTFNCVFDEAKRKFFRAFNALYGRVGRSASDEVVVSLIKAKCLPIMLYGAEVCHLTKYQIRSFDFSINRLFMKIFKTGSISVVHECQVNFNFISVGYLIDIRESKFLYDFSNVNNYICQLFTKHANYRLSELYSLYGVSTVGQLRVAAQIAFASDC

SEQ ID NO: 415 - protein, 975 aa, synthetic construct
MDNCNIITYNMHGFNQGAELVKSYCSNAVSDFMLLQELWLSSDSLYKLDNIAHGYSCFSVSSMDSVLENGLLRGRPFGGLAILVRENHRNLCSLLASNERLIAVVYNDILIINVYFPCSSRLNYKDETLDLLVQIEELLGCFVGDKVVIGGDLNCTLEIESWSSKLIRGFIDDHNFISCNNLPIDVTGTVYTVYTYSNEVLGHYSYLDYFVVSSNLSLSIVSLKIGCDELNLSDHSPVSMEAKNIINVDYKKSNSSCNKGDLIPETCYHNRWDHADTVGYYESTRVGLQPVLEDLRSCLTNLKTVNVSNTKQRMKESIDSVYITILAVLNDAAYRHVPRIKANILKFWWDQELSDLKSKAMASNKVWIEAGRPRSGYIFDVRKADKYKYKSLIKRKQLEIRNNITNDLHDALVQKDTEDFWKVWKSKFPNKKVNKFPLIDGSSDPNIIANKFVDFFSNVCTSEPLAYKNANNDFLNRLQDFMGDSTSNKDTVSVELLEEVLESMSRGKAAGLDNLTIEHIQFAHPIIITILKELFNCFLEVGMVPDGFRDGLAIPLPKNDNASHNVNVDNFRCITISPVISKLFEHCLLRLFSKYFHSNDAQFGFKKKLGCSHAIYSVKQVVDYYVRGGSTVNICTIDISKAFDKVNLFILLGKLMDRNIPNCVIMVLFDWFTNSYITVKWLNVLSLRCQVNSGVRQGGVMSPVLFAIYVDEILDKLNNSGLGCNVKGLTVNSFMYADDLIILSASVTHLQKLINICVDELKSIQLSVNAKKCFCMRIGKRYAVSCNSVVIDNYHVQWTNEIRYLGVYFTAGHLLKFNFVPYKRRFYRCLNCILNKTGIKAINVVLSLTQSYCVPFLLYSVESTNLTATEKLRLASPFKMLFSRLFNSFDAQTIAYCQYYTGYLTLEFVIDQRRLKFLNNICNLNNVVIHSLFRLNGATEISSLIAKYNTNMFDIKSIKYSMWNSFILVNNLGVE

SEQ ID NO: 416 - protein, 975 aa, synthetic construct
MSLTMPANNNLFNFTTVVCNTDVTSKLVIISYNLHGLNQGLHGLRELISKCNPDVLCIQEHWLTPANLYKLKSISSAYSAYGSSAMSDTVSRGPLVGRPFGGTAILVKKKIDSATSNIVCRDRVTSICILDWLIVNVYMPCAGTVDQLLLYSDTIDYIDSVLFECPGLNIFMAGDMNTDLNVFSPISDLVNNFLLRNKLHRCDILFPVSLKYTYMNESLNCSSTIDYMFTSSVYLTVAYTIVDIDVNLSDNVPLISVCLCRPLVQSRDDTIKCPVDVEHFRWDHAPTHLYYEQTRMLLQPILDDVNFLLCTNDTDGKFEINTTNIIYDKIVQALQESANKFIPKRRKNFYKYWWNQELDELKDKAIASCKLWKKARKPRSGPISVKYKQDKSNYKLGIKRAQNADVSFYSNELHDALMRKNGREFWKVWNSKFTKSSDGHLLVDGLSDCAKIANKFADHFKMVCQPFSEKRSTELKAMYDSARANYVGQSIIDDQRVFDVQLISEKIMQMKSGKAAGLDKLSAEHLMYCHPIISVILCKLFNICMLSGHVPSGFGASYTVPIPKVEKSCRSLTVDDFRGISISPVISKVFELCLLDRYQDHLITSDHQFGFKHSIGCRHVIYNVRKTVDHYVNNGSTVNICSIDLSKAFDRMNHYALFLKLIKRGIPLALLSVMEYWFKLSVTCVRWCGYESPFFRLLAGVRQGGVLSPLLFSIFIDDIVYRVISTKVGCYISHVCVSIFLFADDILLLAPTLFGLQKLLSACEDELEFIDMHLNAVKSVCMRVGARFDASCASIYTHLGVALKWVETCKYLGVYMVSSKTFNCVFDEAKRKFFRAFNALYGRVGRSASEEVVVSLIKAKCLPIMLYGAEVCHLTKYQIRSFDFSINRLFMKIFKTGSISVVHECQVNFNFISVGYLIDIRESKFLYDFSNVNNYICQLFTKHANYRLSELYSLYGVSTVGQLRVAAQIAFASDC

SEQ ID NO: 417 - protein, 962 aa, synthetic construct
MDNCNIITYNMHGFNQGAELVKSYCSNALSDFMLLQELWLSSDSLYKLDNIAHGYSCFSVSSMDSVLENGLLRGRPFGGLAILVRENHRNLCSLLASNERLIAVVYNDILIINVYFPCSSRLNYKDETLDLLVQIEELLGCFVGDKVVIGGDLNCTLEIKSWSSKLIRGFIDDHNFISCNNLPIDVTGTVYTYFNEVLGHYSYLDYFVVSSNLSLSIVSLKIGCDELNLSDHSPVSMEAKNIINVDYKKSNSSCNKGDLIPETCYHNRWDHADTVGYYESTRVGLQPVLEDLRSCLTNLKTVKASNTKQRMKESIDSVYITILAVLNDAAYRHVPRIKANILKFWWDQELSDLKSKAMASNKVWIEAGRPRSGYIFDVRKADKYKYKSLIKRKQLEIRNNITNDLHDALVQKDTEDFWKVWKSKFPNKKVNKFPLIDGSSDPNIIANKFVDFFSNVCTSEPLAYKNANNDFLNRLQDFMGDSTSNKDTVSVELLEEVLESMSRGKAAGLDNLTIEHIQFAHPIIITILKELFNCFLEVGMVPDGFRDGLAIPLPKNDNASHNVNVDNFRCITISPVISKLFEHCLLRLFSKYFHSNDAQFGFKKKLGCSHAIYSVKQVVDYYVRGGSTVNICTIDISKAFDKVNLFILLGKLMDRNIPNCVIMVLFDWFTNSYITVKWLNVLSLRCQVNSGVRQGGVMSPVLFAIYVDEILDKLNNSGLGCNVKGLTVNSFMYADDLIILSASVTHLQKLINICVDELKSIQLSVNAKKCFCMRIGKRYAVSCNSVVIDNYHVQWTNEIRYLGVYFTAGHLLKFNFVPYKRRFYRCLNCILSKTGIKAINVVLSLTQSYCVPFLLYSVESTNLTATEKLRLASPFKMLFSRLFNSFDAQTIAYCQYYTGYLPLEFVIDQRRLKFLNNICNLNNVVIHSLFRLNGATEISSLIAKYNTNMFDIKSIKYSMWNS

SEQ ID NO: 418 - protein, 707 aa, synthetic construct
CHVVLGGDFNVDFSRSWTHTALLNSFCVSNGLEPTINHVNSRIDYSYNFNMERFSVLDHFIVSGTVYDQLIDSLTALHDVDNISDHDFILFNMKIDIRYIGAANRVYSVRQSWVKASADDFIRYRLNLSDNLKSIRFPTSAILCPDLHCADSDHISAICQYTQDISDACLSAAKSAIPRTAYSGNHDLVHRIPGWAEVVEPVRQKSLFWHNIWNDCDRPRTGVVADCMRRTRTRYHCAIRQAKKDEESIIRRRFAESLHNNPSRNFWAEVKKIRGNKVSRSRIVDGCTDESIISKKFAEKYRALYTSVPFDHDEMRTISNDVNSRLIDGNMVDNNYVITSQDVTDAVSRLHAHKTDGNIGLSTDHFLHAGIDLHMHVSFLFTCAIVHGCVPADFACSTILPIPKKSNANCSDSDNYRGIALSSVFCKIFDNIVLEKFRDVLETSELQFGFKQSSSTNMCTMILKEAISYYINNNTFAFCTFLDASKAFDRVNYCKLFRLLATRGLPALVVRFIIKLYTANSVCVSWAGFTSDYFNVVNGVKQGGVLSPVLFCIYIDNMLTNLSSCGAGCYIGSNFVGALAYADDVVLIAPTPSAMRKMLAVCDSFALEHNILFNASKSKFVVIAPRNKRLLYKQMCECVFYIGGQKVDSVDSYVHLGHIINSTFVDSEDILHRRNCFVGQANNVLCFFGKLDFDVKISLFKSYCSSF

SEQ ID NO: 419 - protein, 866 aa, synthetic construct
NITVGIATCERFTAIKLANWLLVNVYLPCSGTDQRLLIYSDVLCEVQSLISAHSDCDYLVGGDFNSDLTDAKSHAINHMINDFIVTNNLCRCDVVFPVATKYTYINESLDCSSTIDYMLTSNCDSTIAFNIMDLDLNLSDHLPILVVLALNADLSNATCNANPSVDVTHLRWDHAQINEYYDLTRLGLDPVLCEVTVVINNFHCAPESMVADQIDALYERVVNVLSQCADQCVPKQRKNFFKFWWSQELAELKEKAIASCRLWKEAGRPRNGPINVKYRQDKLLYKKRIREERAEESSSFTNDLHEALLRKSGSDFWKVWNSKFENKSSKIIQVGGTADSNVIVNNFAKHFEEVCQPFTAARNADLKAQYDDVRVNYSTPPVFSDAEIFDAELVGNLLVKMKNGKAAGLDGITSEHLKHSHPSVVVILCKLFNLFIATGHIPISFAASYTVPIPKCDGRSKSLEVNDFRGISISPVISKLFELCVLERYRDYFDTSDHQFGFKKTLSCSHVIYSVRTVIENFISNGSTVNLCALDLSKAFDRMNHYALFIKLIKRKFPVEILQILEHWFCGSKTCVRWGGQVSYFFAMVAGVRQGGVLSPVLFSIFIDDIVNKVKLANVGCYLSNICVSIFLYADDILLIAPTVTGLQTLLTVCEQELLELDMKLNVDKSVCIRFGDQFDASCTDIMSVQGGRLLWVDSCRYLGVYFTSGRVFRCCFHNAKCSFFRSFNAIFSKVGRFASEQVILSLLRTKCLPILLYGLEACPVLKSDKHSLNFTLTRLFMKLFRTGSPAVVAECQLQFNFLPLQYQVDIRTAKFLFRFLNSANSLCILLSVHAKAQLTSILSSYGEDVSSIYDLHVAISDILVA

SEQ ID NO: 420 - protein, 971 aa, synthetic construct
MMAALSNSTHLIGNSNCTGARLVVISYNLHGLNQGMTGIRELIRHVNPDVIMVQEHWLTSDNLFKLSDISDKYFVFGSSAMDARVSAGPLVGRPFGGTAMLIKNSFVNITVGIATCERFTAIKLANWLLVNVYLPCSGTDQRLLIYSDVLCEVQSLISAHSDCDYLVGGDFNSDLTDAKSHAINHMINDFIVTNNLCRCDVVFPVATKYTYINESLDCSSTIDYMLTSNCDSTIAFNIVDLDLNLSDHLPILVVLALNADLSNATCNANPSVDVTHLRWDHAQINEYYDLTRLGLDPVLCEVTVVINNFHCAPESMVADQIDALYERVVNVLSQCADQCVPKQRKNFFKFWWSQELAELKEKAIASCRLWKEAGRPRNGPINVKYRQDKLLYKKRIREERAEESSSFTNDLHEALLRKSGSDFWKVWNSKFENKSSKIIQVGGTADSNVIVNSFAKHFEEVCQPFTAARNADLKAQYDDVRANYSTPPVFSDAEIFDAELVGNLLVKMKNGKAAGLDGITSEHLKHSHPSVVVILCKLFNLFIATGHIPISFAASYTVPIPKCDGRSKSLEVNDFRGISISPVISKLFELCVLERYRDYFDTSDHQFGFKKTLSCSHVIYSVRTVIENFISNGSTVNLCALDLSKAFDRMNHYALFIKLIKRKFPVEILQILEHWFCGSKTCVRWGGQVSYFFAMVAGVRQGGVLSPVLFSIFIDDIVNKVKLANVGCYLSNICVSIFLYADDILLIAPTVTGLQTLLTVCEQELLELDMKLNVDKSVCIRFGDQFDASCTDIMSVQGGRLLWVDSCRYLGVYFTSGRVFRCCFHNAKCSFFRSFNAIFSKVGRFASEQVILSLLRTKCLPILLYGLEACPVLKSDKHSLNFTLTRLFMKLFRTGSPAVVAECQLQFNFLPLQYQVDIRTAKFLFRFLNSANSLCILLSVHAKAQLTSILSSYGEDVSSIYDLHVAISDIL

SEQ ID NO: 421 - protein, 1004 aa, synthetic construct
MASEQINLRDCDSAEKLIVISYNLHGLNQGRPGITELISLLSPDAIMIQEHWLTPDNMYKLDQLSDNYLVFGSSAMNDCVLSGPLIGRPFGGTAIIIKKSLASVTKNIISSDRYNVVKIANWLLFNVYMPCVGTDYREYLYVEILSEFDSLLAANPNCSCLVGGDFNTCLDNPVNVSVTINTFIANNMLHRCDILFPSSNKFTFFNESTHSGTAIDYMLASDPNDIIAFNVLDMDINLSDHHPIMAVCACPKLSIDPSSCQTNLPEIQHFRWDHAQLDNYYEHTRRLLQPVYDELNVLACCHVSLDAMIVADKIDSIYNRFVTALCVSAEKFIPKHRKNFYKFWWSQELDALKEKSIASCRKWKEAGKPRNGPIQAQYKKDKLLYKKCIKEEQAAETCSFTNDLHDALLCKSNQDFWKTWRSKFSNNSNNIIQVDGIADGAAIANNFANFFESNSKPFSDSRNAELKAQYTELRADYCGCPVTDNELFDVELIGKLITEMKNNKAAGLDELTCEHLKFSHPIAICILTQLFNLFIALSHIPSSFGASYTVPIPKCDGRTRAMSVDDFRGISISPVISKVFEMAVLDRFAPYFRTSDHQFGFKRNIGCREAIYSVRNVIETFISNGSTINVCTLDLSKAFDRMNHYALLIKLIERKLPFQLLIVLENWFLISITCVKWNGHVSHFFRLLLGVRQGGVLSPLLFAIFVDDIVIRVKSTHAGCYISLVCCCIFLYADDILLVSPTVSGLQILLNACENELTELDMKINVKKSMCIRFGKRFDVHCAELVSVQGGPILWVDSCRYLGVYFLSGRSFRCSLDDAKSRFFRAFNAIYSKVGHFASETVILNLIRTKCLPILLYATEACPLLSRQKHSLEFTVTRIFMRIFHTGSMDIVKQCQCNFGFLSVSYQLSVRTARFLQKLVASENSLCLLFSRTASDQLAKIFSFFDEDIKTACQLNNFFYTNYCLLALINWVLINRKFIYLFIFFYFFFRFNINLFVLLMSGRC

SEQ ID NO: 422 - protein, 337 aa, synthetic construct
MFIPKHRKNFYKFWWSQELDLLKSKAIESNNAWKCAGKPKNGAIFSQYKQDKLIYKKRIREECFNETKSYTNDLHDALLCKSGQAFWKTWQSKFESKSANVMQVDGTADSDIITDKFAKYFEANCSPFSTERNDEFKKKYTELRLHYSGSPITDDQAFDVELISRLVSNMDKGKAAGLDELSSEHLKFSHPILICILTKLFNLFVFKGHIPTSFGSSYTVPIPKCDGRTRALSVDDFRGISISPVLSKLFELAIFDRFSTYFTTSDHQFGFKKHLSCRNAIYCVRNVVESFGSNGSTVNVCALDLSKVFDRMNHYALFIKLIERDFPTKLLNVLETW

SEQ ID NO: 423 - protein, 903 aa, synthetic construct
YFVFGSSAMSERVASGPLYGRPFGGTAIFINNKYASVTTNLVSSDRYTAIKIANFMLITVYMPSVGTAQRDFLCSELLAELDALLSSNSNSNSNCQFLIGRDFNTNLDSNANVSLAINEFISNNSIYRCDEIFDVADSYTFCNETAHCFSTIDYMLTSCAQDIIAFNVVDMDINLSDHNPILSVCSCCIDTRSVNKNEKSADLYAEFFRWDHAPVDKYYDQTRVLMQPVLDEISSLVINSAYMDKESIAIASDSIYDNLVDAMRSSANLFIPKHRKNFFKFWWSQELDELKEKAIVSCREWKSAGKPKSGVTFQQYLKDKALYKKSIRYEQQREKSCYTNDLHEALLHKNGQDFWKVWKSKFEIGSTNTIVDGLADSAAIANKFAQHLESNCRPFNSERSAALKIQYIDQRAQYCGTPITDCQWFDVELIDRLTREMKNGKAAGLDEISCEHLKFSHPIVVCILSKLFNLFLSTGHIPASFGVSYTVPIPKCDGRTRALTVDDFRGISISPVISKLFEMAVLDRFSHYFVTSDYQFGFKKHLSCSNAIFCVRNVIENFVSRGTTVNVCTLDLSKAFDRMNHYALLVKLMSRKIPDLLLCIFELWFSISVTCVKWDNHFSHFFLLIVGVRQGGVLSPVLFAIFIDSIVDKVKSTNVGCYISLICCCIFLYADDIILIAPSIHALQTLLNACEDELFVLDMCVNVKKSACIRFGTRHDAQCCEIISSFGGSIKWVESCRYLGVFLVSGRNYSCSFHDAKSRFFRAFNAVFGKIGRIASEEVVLSLLKAKCLPILLFATEACPLLSRQKTSFDFTLTRIFMKLFNTGSAVIAKECQNLFNFLPIRMQLSIRTARFLQKFAACENNLCSLFADIAVKQLNVLFSEYNVKTACQLANAIYRKLSETLN

SEQ ID NO: 424 - protein, 613 aa, synthetic construct
MAANLVTISYNLHGYNQGCPGIRELMLKLRPDIFMLQEHWLSPDDLSKLDNISDCYFVFGSSAMLDCVSSGPLVGRPFGGTAFLINKKHVSATSNIESGDRFTVIKIYNWLLINVYLPCVGTPHRDDLYLDILHQLQNIISANSDCSCLIGGDFNVDLDCNSNISLLVNEFMGNNNMHRCDVMFPVSNRNTFVNEATNTGSAIDYILSSTSDNMIAFNILELDVNLSDHLPIMAVCAIDRSFLSLNTHGESYSTDDVTHLRWDHAPLHLYYEHTRLLLQPVLANIDELLESSIAEDDMLYVKGADQIYSNIVNILRESANLYIPKHKKNFYKFWWSQELDLLKSKAIESNNAWKCAGKPKNGAIFSQYKHDKLIYKKRIREECFNETKSYTNDLHDALLCKSGQAFWKTWKSKFESKSANVMQVDGTADSDIITDKFAKHFEANCSPFSTERNDEFKKKYTELRLHHSGSPITDDQAFDVELISRLVTNMDKGKAAGLDELSSEHLKFSHPILICILTKLFNLFLLKGHIPTSFSYSYTVPIPKCDGRTRALSVDDFRGISISPVLSKLFEMAIFDRFSTYFTTSDHQFGFKKHLSCRNAIYCVRSVVESFVS

SEQ ID NO: 425 - protein, 973 aa, synthetic construct
MMAALSNSTHLIGNSNCTGARLVVISYNLHGLNQGMTGIRELIRHVNPDVIMVQEHWLTSDNLFKLSDISDKYFVFGSSAMDARVSAGPLVGRPFGGTAMLIKNSFVNITVGIATCERFTAIKLANWLLVNVYLPCSGTDQRLLIYSDVLCEVQSLISAHSDCDYLVGGDFNSDLTDAKSHAINHMINDFIVTNNLCRCDVVFPVATKYTYINESLDCSSTIDYMLTSNCDSTIAFNIVDLDLNLSDHLPILVVLALNADLSNATCNANPSVDVTHLRWDHAQINEYYDLTRLGLDPVLCEVTVVINNFHCAPESMVADQIDALYERVVNVLSQCADQCVPKQRKNFFKFWWSQELAELKEKAIASCRLWKEAGRPRNGPINVKYRQDKLLYKKRIREERAEESSSFTNDLHEALLRKSGSDFWKVWNSKFENKSSKIIQVGGTADSNVIVNSFAKHFEEVCQPFTAARNADLKAQYDDVRANYSTPPVFSDAEIFDAELVGNLLVKMKNGKAAGLDGITSEHLKHSHPSVVVILCKLFNLFIATGHIPISFAASYTVPIPKCDGRSKSLEVNDFRGISISPVISKLFELCVLERYRDYFDTSDHQFGFKKTLSCSHVIYSVRTVIENFISNGSTVNLCALDLSKAFDRMNHYALFIKLIKRKFPVEILQILEHWFCGSKTCVRWGGQVSYFFAMVAGVRQGGVLSPVLFSIFIDDIVNKVKLANVGCYLSNSCVSIFLYADDILLIAPTVTGLQTLLTVCEQELLELDMKLNVDKSVCIRFGDQFDASCTDIMSVQGGRLLWVDSCRYLGVYFTSGRVFRCCFHNAKCSFFRSFNAIFSKVGRFASEQVILSLLRTKCLPILLYGLEACPVLKSDKHSLNFTLTRLFMKLFRTGSPAVVAECQLQFNFLPLQYQVDIRTAKFLFRFLNSANSLCILLSVHAKAQLTSILSSYGEDVSSIYDLHVAISDILVA

SEQ ID NO: 426 - protein, 388 aa, synthetic construct
AIFDRFSTYFTTSDHQFGFKKHLSCRNAIYCVRSVVESFVSNGSTVNVCALDLSKAFDRMNHYALFIKLIERDFPTKLLNVLETWFCTSITCVKWGRNVSSFFSLHAGVRQGGVLSPILFSVFIDDIVAKVKVANVGCHISTICASIFLYADDVMLVAPSVSGLQSLLTVCENELIKLDMRINIKKSMCIRFGQRFDAPCEELVSIFGGSLKWVSICRYLGVYFVSGRTFKCCFHMAKSQFYRAFNSVFSKVGRAASEEIILVLINAKCMPILMYALEACPLLSRDKHSFQFTITRLFMKLFRTGSTAVVEECQRQFNFLPFKQQLDIRTAKFLQSFLASENSLCLLFEINARLLLNSIFSNYGNTVRTACQLVNKIHEHFFLVRNQD

SEQ ID NO: 427 - protein, 1010 aa, synthetic construct
MDQLRNNVNARSLPGSNALYGSSTVSKEQGPLHRRPDVVKSKQGFPHFRERVWVKKLVHDRRIRFGTWNIGTLTGKSMEIVDVMVRRKINFMCLQETKWTGEKAKELDNSGFKLWYTGKIRSRNGVGIIVDKEWKKDVVDVRRVGDRIIVLKLVVGQDTFNVISGYAPQVGLAEHFKVKFWEDLEGVLQDIPQGEKVFLGGDLNGHVGSVARGFEGVHGGFGLGEMNGEGKSILEFSEALDLSIANTWFKKREEHLITYKSGGTCSQIDFFLIRKSDRKYCLNCKVIPGESLTTQHRVLVMDVRIRDRAKRRSPLVAPRIKWWHLKGEKQGIFQQKIWEGWCGQSQGSANDMWNKMSQEIIKVAKETLGESRGFGPRGKESWWWNENVQSKVRVKKECFKEWSRCRNSETWDKYKIARNETKKAVSEARAQAFDGLYQALGTRDGERSIYRLAKGRERKTRDLDQVKCVKDEEGKVLVHEKDIKERWKVYFHNLFNDGYGYDSSSLDTREEDRNYKYYRRIQKQEVKEALKRMSNGKAVGPDNIPIEVWKTLGDRGLEWLTELFNEIMRSKRMPEEWRRSTLVPIYKNKGDIQNCANYRGIKLMSHTMKLWERVIERRLRKETQVTENQFGFMPGRSTMEAIYLLRRVMEQYRMAQQDLHLIFIDLEKAYDRVPREILWKALEKKGVRVAYIRAIQDMYDRVSTSVRTQGGESDDFPITIGLHQGSTLSPYLFTLILDVLTEQIQEIAPRCMLFADDIVLLGESREELNERLETWRRALETHGFRLSRSKSEYMECKFNKRRRVSNSEVKIGDHIIPQVTRFKYLGSVIQDDGEIEGDVNHRIQAGWMKWRKASGVLCDAKVPIKLKGKFYRTAVRPAILYGTECWAVKSQHENKVGVAEMRMLRWMCGKTRQDKIRNEAIRERVGVAPIVEKMVENRLRWFGHVERRPVDSVVRRVDQMERRQTIRGRGRPKKTIREVIKKDLELNDLDRSMVLDRTLWRKLIHVADPT

SEQ ID NO: 428 - protein, 712 aa, synthetic construct
MVEFWARPDSSKGNKLPLRLPEFALRYTEVRSAIRSTWEEFRGFFPLPHDDDSEAQKRVHWEVESHQWDKCKKKMLVAGAAAYRAVRKVEMAPLCKTKKMWEKRKRRCHSMGLNNPRAAQWKEQEAQAREAYFSLLTSIGRRKKDMAEARAIKYRGKSNTHFLRPSFMSRKRAGITSMSVDGSDNKDMERTSDASIWKTNFNEFYKELYSPKVIDTDVLNDILAETDISLPPRLLTKLRRKAKLSEIEKIIDTLPAGKAPGPDSLPYGVWGILRDTSPMAFCNLFNACMDRGKIVNSARKANIALLPKEPDSFACGMYRPISLTNTDYKIIMRVWADRLGPMLNTVVGGHQLGFIPGRDGRENIINEQFLIDYYQHKGLRGAVVFLDLQKAFDCVSHEALMIIMRHHGWPEEFVGFVENVYMHNTARLIVNGELSEESVKVESGTRQGCPLSPLLFTLVAEMLCQPIINDTGFKGTNMEGGNRKALSAYADDIAINNSCDGDVDIMNDKLDRFKQATGMRVNKKKSEAVLVGGWVKRPPGALLFPCVCKVKYLGCPVGRLTDLDYTNTLEAMEGKLDATFRRWNRAATAPKDRILLAKTMALSKLWYMASVMPWSIQSLRRIQKTTIRYIWGFKSHKVSMAQLQLPKKELGLNMWSLVAKVRALNARWGLHYVTNRLSPNLLNLIQTVYNSPKVGRMDKDREPLEYSGSLPG

SEQ ID NO: 429 - protein, 704 aa, synthetic construct
IKMRPKVLKNLGIKWWALKGEMKLAFREKMFKQDSWNTMEDTNVMWERMAKQIKELGRQVVGESKGQAPFHKESWWWQKEVQDKVNAKRACYKALYKCRNDENKEKYKTARKEAKEAVSKARNVAYEDLYRRLNTKDGEKDIYRLAKARDKKTKDLSNVKCIKDECQKVLVEDEAIRRRWMSYFQQLFNEGVDNEQVRGSLRNMEENKNYEYYRKIREYEVENALNKMKNGKAVGPDEIPIEVWKCLGRKGILWLTSLFNRILKTKKMPEEWRKSILIPIFKNKGDIQNCANYRGIKLMSHTLKLWERVLEQRLRKETSISENQFGFMPGRSTMEAIHLLRMLIERYRSKKQDLHMVFIDLEKAYDRVPREILWRVLALKGIKVAYIQAIKDMYEGATTYVKTPCGVSQEFSISIGLHQGSALSPYLFAIVMDELTKHIQDEVPWCMLFADDIVLVDETRAGINHKLELWRETLEGKGFRLSRSKTEYMEFKFSQQRSRTQEAVRIGDTKVPTSGRFRYLGSILQRDGGIDDDVRHRIQAGWSKWRSATGVLCDRKVPEKLKDKFYRTAIRPAMLNGTECWATKHEHEQKMKVAEMRMLRWICGHSRMDKIRNEVIRERVGVAPIEEKMMENRLRWYGHIMRRDPDAPVRRCAIRDIEIGRRGRGRPRKTWWETIRKDLELLELDESIVNRTQWRNRIHIADPT

SEQ ID NO: 430 - protein, 1018 aa, synthetic construct
MNHLRKIVGASPTQRRAASNPGCSDKWARVARSSSGSDAPHRRPGVVSNEQGFPRLSGRARVKKLAQERRIRLASWNVGSLTGRLAELAEVMCRRKISILCVQETKWVGEKARVVEPWGCKLWYTGVDRSRNGVGIIIDKSLVEDVVEVIRRGDRILLVRLVLGNEILNVISAYAPQVGLDEASKRKFWEDLDEVVQRIPVREKLFIGGDFNGHVGTSRVGFEELHGGYGFGDRNEGGQSILDFALAYDLVVANTWFRKRDSHIITYRSGPSKSQIDFFLARRLDRGCCLDCKVIPGESVVTQHRLLVLDARLSRGCSRSRRRLEPRIKWWRLREATQKTFIEGIVRGADWKCEDDPDTTWTKMTSCIKKVATDLLGESKGSGLPGKDTSWWNDEVKAAIKTKRDCYRDLKRNNDGASFERYKIAKKEAKKAVQQARDRVYKDIYEKRDNKDAERDMYKLARIREKKSRDLGVVKCIKDDRQTVLVHDDQIKDRWREYFDGLFNGDFSQDVGNITVSPIDMNRNFLRRIQRSEVKDALKRMKTRKAVGPDGIPIEVWRVLGEVGVSWLTDLFNKIWRTNKIPNEWRKSTLVPIYKNKGDIQNCSNYRGIKLMCHTMKLWERVIEHRLRQFVLISENQFGFMPGRSTTEAIHLIRQLIERFREKNRDLHMVFIDLEKAYDKVPREVLWWTLVKKRVPVKYINIIKDMYDNVETSVRTCGGLTSAFPITIGLHQGSALSPFLFAIVIDEITRAIQGQVPWCMMFADDIVLIDETRAGVNGKLELWRHTLESRGFRLSRTKTEYLECKFNKRRTPDDSTVKLAGQEIPRSTQFRYLGSILQKDGEIDGDVHHRIQAGWMKWKSATGILCDRNFPLKLKGKFYRTAIRPALLYGSECWAIKQQQVQKMSVAEMRMLRWMCGHTRQDRIRNEVIRTKLGVTSIEEKMRENRLRWFGHVKRRPIDAPVRRVETLDLGQTCRARGRPKKTWMEVIRNDMKLRGVTEDVIHRRNEWRKRIHVADST

SEQ ID NO: 431 - protein, 1018 aa, synthetic construct
MNHFRKIVGASPTQRRAASDPGCSDKWARVARSSPGSDAPHRRPGVVSNEQGFPRLSGRARVKKLAQERRIRLASWNVGSLTGRLAELAEVMCRRKISILCVQETKWVGEKARVEEPWGCKLWYTGVDRSRNGVGIIIDKSLVEDVVEVIRRGDRILLVRLVLGNEILNVISAYAPQVGLDEASKRKFWEDLDEVVQRIPVREKLFIGGDFNGHVGTSRVGFEELHGGYGFGDRNEGGQSILDFALAYDLIVANTWFRKRDSHIITYRSGPSKSQIDFFLARRLDRGCCLDCKVIPGESVVTQHRLLVLDARLSRGRSRSRRRLEPRIKWWRLREATQKTFVEGIVRGADWKCEDDPDTTWTKMTSCIKKVATDLLGESKGSGLPGKDTSWWNDEVKAAIKTKRDCYRDLKRNNDGASFERYKIAKKEAKKAVQQARDRVYKDIYEKRDNKDAERDMYKLARIREKKSRDLGVVKCIKDDRQTVLVHDDQIKDRWREYFDGLFNGGFSQDVGNITVSPSDMNRNFLRRIQRSEVKDALKRMKTRKAVGPDGIPIEVWRVLGEVGVSWLTDLFNKIWRTNKIPNEWRKSTLVPIYKNKGDIQNCSNYRGIKLMCHTMKLWERVIEHRLRQFVLISENQFGFMPGRSTTEAIHLIRQLIERFREKNRDLHMVFIDLEKAYDKVPREVLWWTLVKKRVPVKYINIIKDMYDNVETSVRTCGGLTSAFPITIGLHQGSALSPFLFAIVIDEITRAIQGQVPWCMMFADDIVLIDETRAGVNGKLELWRHTLESRGFRLSRTKTEYLECKFNKRRTPDDSTVKLAGQEIPRSTQFRYLGSILQKDGEIDGDVHHRIQAGWMKWKSATGILCDRNFPLKLKGKFYRTAIRPALLYGSECWAIKQQQVQKMSVAEMRMLRWMCGHTRQDRIRNEVIRTKLGVTSIEEKMRENRLRWFGHVKRRPIDAPVRRVETLDLGKTCRARGRPKKTWMEVIRNDMKLRGVTEDVIHRRNEWRKRIHVADST

SEQ ID NO: 432 - protein, 1018 aa, synthetic construct
MNHFRKIVGASPTQRRAASDPGCSDKWARVARSSPESDAPHRRPGVVSNEQGFPRLSGRARVKKLAQERRIRLASWNVGSLTGRLAELAEVMCRRKISILCVQETKWVGEKARVEEPWGCKLWYTGVDRSRNGVGIIIDKSLVEDVVEVIRRGDRILLVRLVLGNEILNVISAYAPQVGLDEASKRKFWEDLDEVVQRIPVREKLFIGGDFNGHVGTSRVGFEELHGGYGFGDRNEGGQSILDFALAYDLVVANTWFRKRDSHIITYRSGPSKSQIDFFLARRLDRGCCLDCKVIPGESVVTQHRLLVLDARLSRGCSRSRRRLEPRIKWWRLREATQKTFVEGIVRGADWKCEDDPDTTWTKMTSCIKKVATDLLGESKGSGLPGKDTSWWNDEVKAAIKTKRDCYRDLKRNNDGASFERYKIAKKEAKKAVQQARDRVYKDIYEKRDNKDAERDMYKLARIRENKSRDLGVVKCIKDDRQTVLVHDDQIKDRWREYFDGLFNGGFSQDVGNITVSPSDMNRNFLRRIQRSEVKDALKRMKTRKAVGPDGIPIEVWRVLGEVGVSWLTDLFNKIWRTNKIPNEWRKSTLVPIYKNKGDIQNCSNYRGIKLMCHTMKLWERVIEHRLRQFVPISENQFGFMPGRSTTEAIHLIRQLIERFREKNRDLHMVFIDLEKAYDKVPREVLLWTLVKKRVPVKYINIIKDMYDNVETSVRTCGGLTSAFPITIGLHQGSALSPFLFAIVIDEITRAIQGQVPWCMMFADDIVLIDETRAGVNGKLELWRHTLESRGFRLSRTKTEYLECKFNKRRTPDDSTVKLAGQEIPRSTQFRYLGSILQKDGEIDGDVHHRIQAGWMKWKSATGILCDRNFPLKLKGKFYRTAIRPALLYGSECWAIKQQQVQKMSVAEMRMLRWMCGHTRQDRIRNEVIRTKLGVTSIEEKMRENRLRWFGHVKRRPIDAPVRRVETLDLGKTCRARGRPKKTWMEVIRNDMKLRGVTEDVIHRRNEWRKRIHVADST

SEQ ID NO: 433 - protein, 1010 aa, synthetic construct
MDQLRNNVNARSLPGSNALYGSSTVSKEQGPLHRRPDVVKSKQGFPHFRERVWVKKLVHDRRIRFGTWNIGTLTGKSMEIVDVMVRRKINFMCLQETKWTGEKAKELDNSGFKLWYTGKIRSRNGVGIIVDKEWKKDVVDVRRVGDRIIVLKLVVGQDTFNVISGYAPQVGLAEHFKVKFWEDLEGVLQDIPQGEKVFLGGDLNGHVGSVARGFEGVHGGFGLGEMNGEGKSILEFSEALDLSIANTWFKKREEHLITYKSGGTCSQIDFFLIRKSDRKYCLNCKVIPGESLTTQHRVLVMDVRIRDRAKRRSPMVAPRIKWWHLKGEKQGIFQQKIWEGWCGQSQGSANDMWNKMSQEIIKVAKETLGESRGFGPRGKESWWWNENVQSKVRVKKECFKEWSRCRNSETWDKYKIARNETKKAVSEARAQAFDGLYQALGTRDGERSIYRLAKGRERKTRDLDQVKCVKDEEGKVLVHEKDIKERWKAYFHNLFNDGYGYDSSSLDTREEDRNYKYYRRIQKQEVKEALKRMSNGKAVGPDNIPIEVWKTLGDRGLEWLTELFNEIMRSKRMPEEWRRSTLVPIYKNKGDIQNCANYRGIKLMSHTMKLWERVIERRLRKETQVTENQFGFMPGRSTMEAIYLLRRVMEQYRMAQQDLHLIFIDLEKAYDRVPREILWKALEKKGVRVAYIRAIQDMYDRVSTSVRTQGGESDDFPITIGLHQGSTLSPYLFTLILDVLTEQIQEIAPRCMLFADDIVLLGESREELNERLETWRRALETHGFRLSRSKSEYMECKFNKRRRVSNSEVKIGDHIIPQVTRFKYLGSVIQDDGEIEGDVNHRIQAGWMKWRKASGVLCDAKVPIKLKGKFYRTAVRPAILYGTECWAVKSQHENKVGVAEMRMLRWMCGKTRQDKIRNEAIRERVGVAPIVEKMVENRLRWFGHVERRPVDSVVRRVDQMERRQTIRGRGRPKKTIREVIKKDLEINGLDRSMVLDRTLWRKLIHVADPT

SEQ ID NO: 434 - protein, 1010 aa, synthetic construct
MDQLRNNVNARSLPGSNALYGSSTVSKEQGPLHRRPDVVKSKQGFPHFRERVWVKKLVHDRRIRFGTWNIGTLTGKSMEIVDVMVRRKINFMCLQETKWTGEKAKELDNSGFKLWYTGKIRSRNGVGIIVDKEWKKDVVDVRRVGDRIIVLKLVVGQDTFNVISGYAPQVGLAEHFKVKFWEDLEGVLQDIPQGEKVFLGGDLNGHVGSVARGFEGVHGGFGLGEMNGEGKSILEFSEALDLSIANTWFKKREEHLITYKSGGTCSQIDFFLIRKSDRKYCLNCKVIPGESLTTQHRVLVMDVRIRDRAKRRSPMVAPRIKWWHLKGEKQGIFQQKIWEGWCGQSQGSANDMWNKMSQEIIKVAKETLGESRGFGPRGKESWWWNESVQSKVRVKKECFKEWSRCRNSETWDKYKIARNETKKAVSEARAQAFDGLYQALGTRDGERSIYRLAKGRERKTRDLDQVKCVKDEEGKVLVHEKDIKERWKAYFHNLFNDGYGYDSSSLDTREEDRNYKYYRRIQKQEVKEALKRMSNGKAVGPDNIPIEVWKTLGDRGLEWLTELFNEIMRSKRMPEEWRRSTLVPIYKNKGDIQNCANYRGIKLMSHTMKLWERVIERRLRKETQVTENQFGFMPGRSTMEAIYLLRRVMEQYRMAQQDLHLIFIDLEKAYDRVPREILWKALEKKGVRVAYIRAIQDMYDRVSTSVRTQGGESDDFPITIGLHQGSTLSPYLFTLILDVLTEQIQEIAPRCMLFADDIVLLGESREELNERLETWRRALETHGFRLSRSKSEYMECKFNKRRRVSNSEVKIGDHIIPQVTRFKYLGSVIQDDGEIEGDVNHRIQAGWMKWRKASGVLCDAKVPIKLKGKFYRTAVRPAILYGTECWAVKSQHENKVGVAEMRMLRWMCGKTRQDKIRNEAIRERVGVAPIVEKMVENRLRWFGHVERRPVDSVVRRVDQMERRQTIRGRGRPKKTIREVIKKDLELNDLDRSMVLDRTLWRKLIHVADPT

SEQ ID NO: 435 - protein, 1010 aa, synthetic construct
MDQLRNNVNARSLPGSNALYGSSTVSKEQGPLHRRPDVVKSKQGFPHFRERVWVKKLVHDRRIRFGTWNIGTLTGKSMEIVDVMVRRKINFMCLQETKWTGEKAKELDNSGFKLWYTGKIRSRNGVGIIVDKEWKKDVVDVRRVGDRIIVLKLVVGQDTFNVISGYAPQVGLAEHFKVKFWEDLEGVLQDIPQGEKVFLGGDLNGHVGSVARGFEGVHGGFGLGEMNGEGKSILEFSEALDLSIANTWFKKREEHLITYKSGGTCSQIDFFLIRKSDRKYCLNCKVIPGESLTTQHRVLVMDVRIRDRAKRRSPMVAPRIKWWHLKGEKQGIFQQKIWEGWCGQSQGSANDMWNKMSQEIIKVAKETLGESRGFGPRGKESWWWNENVQSKVRVKKECFKEWSRCRNSETWDKYKIARNETKKAVSEARAQAFDGLYQALGTRDGERSIYRLAKGRERKTRDLDQVKCVKDEEGKVLVHEKDIKERWKAYFHNLFNDGYGYDSSSLDTREEDRNYKYYRRIQKQEVKEALKRMSNGKAVGPDNIPIEVWKTLGDRGLEWLTKLFNEIMRSKRMPEEWRRSTLVPIYKNKGDIQNCANYRGIKLMSHTMKLWERVIERRLRKETQVTENQFGFMPGRSTMEAIYLLRRVMEQYRMAQQDLHLIFIDLEKAYDRVPREILWKALEKKGVRVAYIRAIQDMYDRVSTSVRTQGGESDDFPITIGLHQGSTLSPYLFTLILDVLTEQIQEIAPRCMLFADDIVLLGESREELNERLETWRRALETHGFRLSRSKSEYMECKFNKRRRVSNSEVKIGDHIIPQVTRFKYLGSVIQDDGEIEGDVNHRIQAGWMKWRKASGVLCDAKVPIKLKGKFYRTAVRPAILYGTECWAVKSQHENKVGVAEMRMLRWMCGKTRQDKIRNEAIRERVGVAPIVEKMVENRLRWFGHVERRPVDSVVRRVDQMERRQTIRGRGRPKKTIREVIKKDLEINGLDRSMVLDRTLWRKLIHVADPT

SEQ ID NO: 436 - protein, 1010 aa, synthetic construct
MDQLRNNVNARSLPGSNALYGSSTVSKEQGPLHRRPDVVKSKQGFPHFRERVWVKKLVHDRRIRFGTWNIGTLTGKSMEIVDVMVRRKINFMCLQETKWTGEKAKELDNSGFKLWYTGKIRSRNGVGIIVDKEWKKDVVDVRRVGDRIIVLKLVVGQDTFNVISGYAPQVGLAEHFKVKFWEDLEGVLQDIPQGEKVFLGGDLNGHVGSVARGFEGVHGGFGLGEMNGEGKSILEFSEALDLSIANTWFKKREEHLITYKSGGTCSQIDFFLIRKSDRKYCLNCKVIPGESLTTQHRVLVMDVRIRDRAKRRSPLVAPRIKWWHLKGEKQGIFQQKIWEGWCGQSQGSANDMWNKMSQEIIKVAKETLGESRGFGPRGKESWWWNENVQSKVRVKKECFKEWSRCRNSETWDKYKIARNETKKAVSEARAQAFDGLYQALGTRDGERSIYRLAKGRERKTRDLDQVKCVKDEEGKVLVHEKDIKERWKAYFHNLFNDGYGYDSSSLDTREEDRNYKYYRRIQKQEVKEALKRMSNGKAVGPDNIPIEVWKTLGDRGLEWLTELFNEIMRSKRMPEEWRRSTLVPIYKNKGDIQNCANYRGIKLMSHTMKLWERVIERRLRKETQVTENQFGFMPGRSTMEAIYLLRRVMEQYRMAQQDLHLIFIDLEKAYDRVPREILWKALEKKGVRVAYIRAIQDMYDRVSTSVRTQGGESDDFPITIGLHQGSTLSPYLFTLILDVLTEQIQEIAPRCMLFADDIVLLGESREELNERLETWRRALETHGFRLSRSKSEYMECKFNKRRRVSNSEVKIGDHIIPQVTRFKYLGSVIQDDGEIEGDVNHRIQAGWMKWRKASGVLCDAKVPIKLKGKFYRTAVRPAILYGTECWAVKSQHENKVGVAEMRMLRWMCGKTRQDKIRNEAIRERVGVAPIVEKMVENRLRWFGHVERRPVDSVVRRVDQMERRQTIRGRGRPKKTIREVIKKDLELNDLDRSMVLDRTLWRKLIHVADPT

SEQ ID NO: 437 - protein, 972 aa, synthetic construct
MKSKQGFPHFRERVWVKKLVHDRRIRFGTWNIGTLTGKSMEIVDVMVRRKINFMCLQETKWTGEKAKELDNSGFKLWYTGKIRSRNGVGIIVDKEWKKDVVDVRRVGDRIIVLKLVVGQDTFNVISGYAPQVGLAEHFKVKFWEDLEGVLQDIPQGEKVFLGGDLNGHVGSVARGFEGVHGGFGLGEMNGEGKSILEFSEALDLSIANTWFKKREEHLITYKSGGTCSQIDFFLIRKSDRKYCLNCKVIPGESLTTQHRVLVMDVRIRDRAKRRSPMVAPRIKWWHLKGEKQGIFQQKIWEGWCGQSQGSANDMWNKMSQEIIKVAKETLGESRGFGPRGKESWWWNENVQSKVRVKKECFKEWSRCRNSETWDKYKIARNETKKAVSEARAQAFDGLYQALGTRDGERSIYRLAKGRERKTRDLDQVKCVKDEEGKVLVHEKDIKERWKAYFHNLFNDGYGYDSSSLDTREEDRNYKYYRRIQKQEVKEALKRMSNGKAVGPDNIPIEVWKTLGDRGLEWLTELFNEIMRSKRMPEEWRRSTLVPIYKNKGDIQNCANYRGIKLMSHTMKLWERVIERRLRKETQVTENQFGFMPGRSTMEAIYLLRRVMEQYRMAQQDLHLIFIDLEKAYDRVPREILWKALEKKGVRVAYIRAIQDMYDRVSTSVRTQGGESDDFPITIGLHQGSTLSPYLFTLILDVLTEQIQEIAPRCMLFADDIVLLGESREELNERLKTWRQALETHGFRLSKSKSEYMECKFNKRRRVSNSEVKIGDHIIPQVTRFKYLGSVIQDDGEIEGDVNHRIQAGWMKWRKASGVLCDAKVPIKLKGKFYRTAVRPAILYGTECWAVKSQHENKVGVAEMRMLRWMCGKTRQDKIRNEAIRERVGVAPIVEKMVENRLRWFGHVERRPVDSVVRRVDQMERRQTIRGRGRPKKTIREVIKKDLEINGLDRSMVLDRTLWRKLIHVADPT

SEQ ID NO: 438 - protein, 827 aa, synthetic construct
LEGVLQDIPQGEKVFLGGDLNGHVGSVARGFEGVHGGFGLGEMNGEGKSILEFSEALDLSIANTWFKKREEHLITYKSGGTCSQIDFFLIRKSDRKYCLNCKVIPGESLTTQHRVLVMDVRIRDRAKRRSPLVAPRIKWWHLKGEKQGIFQQKIWEGWCGQSQGSANDMWNKMSQEIIKVAKETLGESRGFGPRGKESWWWNESVQSKVRVKKECFKEWSRCRNSETWDKYKIARNETKKAVSEARAQAFDGLYQALGTRDGERSIYRLAKGRERKTRDLDQVKCVKDEEGKVLVHEKDIKERWKAYFHNLFNDGYGYDSSSLDTREEDRNYKYYRRIQKQEVKEALKRMSNGKAVGPDNIPIEVWKTLGDRGLEWLTELFNEIMRSKRMPEEWRRSTLVPIYKNKGDIQNCANYRGIKLMSHTMKLWERVIERRLRKETQVTENQFGFMPGRSTMEAIYLLRRVMEQYRMAQQDLHLIFIDLEKAYDRVPREILWKALEKKGVRVAYIRAIQDMYDRVSTSVRTQGGESDDFPITIGLHQGSTLSPYLFTLILDVLTEQIQEIAPRCMLFADDIVLLGESREELNERLETWRRALETHGFRLSRSKSEYMECKFNKRRRVSNSEVKIGDHIIPQVTRFKYLGSVIQDDGEIEGDVNHRIQAGWMKWRKASGVLCDAKVPIKLKGKFYRTAVRPAILYGTECWAVKSQHENKVGVAEMRMLRWMCGKTRQDKIRNEAIRERVGVAPIVEKMVENRLRWFGHVERRPVDSVVRRVDQMERRQTIRGRGRPKKTIREVIKKDLELNDLDRSMVLDRTLWRKLIHVADPT

SEQ ID NO: 439 - protein, 1010 aa, synthetic construct
MDQLRNNVNARSLPGSNALYGSSTVSKEQGPLHRRPDVVKSKQGFPHFRERVWVKKLVHDRRIRFGTWNIGTLTGKSMEIVDVMVRRKINFMCLQETKWTGEKAKELDNSGFKLWYTGKIRSRNGVGIIVDKEWKKDVVDVRRVGDRIIALKLVVGQDTFNVISGYAPQVGLAEHFKVKFWEDLEGVLQDIPQGEKVFLGGDLNGHVGSVARGFEGVHGGFGLGEMNGEGKSILEFSEALDLSIANTWFKKREEHLITYKSGGTCSQIDFFLIRKSDRKYCLNCKVIPGESLTTQHRVLVMDVRIRDRAKRRSPLVAPRIKWWHLKGEKQGIFQQKIWEGWCGQSQGSANDMWNKMSQEIIKVAKETLGESRGFGPRGKESWWWNENVQSKVRVKKECFKEWSRCRNSETWDKYKIARNETKKAVSEARAQAFDGLYQALGTRDGERSIYRLAKGRERKTRDLDQVKCVKDEEGKVLVHEKDIKERWKVYFHNLFNDGYGYDSSSLDTREEDRNYKYYRRIQKQEVKEALKRMSNGKAVGPDNIPIEVWKTLGDRGLEWLTELFNEIMRSKRMPEEWRRSTLVPIYKNKGDIQNCANYRGIKLMSHTMKLWERVIERRLRKETQVTENQFGFMPGRSTMEAIYLLRRVMEQYRMDQQDLHLIFIDLEKAYDRVPREILWKALEKKGVRVAYIRAIQDMYDRVSTSVRTQGGESDDFPITIGLHQGSTLSPYLFTLILDVLTEQIQEIAPRCMLFADDIVLLGESREELNERLETWRRALETHGFRLSRSKSEYMECKFNKRRRVSNSEVKIGDHIIPQVTRFKYLGSVIQDDGEIEGDVNHRIQAGWMKWRKASGVLCDAKVPIKLKGKFYRTAVRPAILYGTECWAVKSQHENKVGVAEMRMLRWMCGKTRQDKIRNEAIRERVGVAPIVEKMVENRLRWFGHVERRPVDSVVRRVDQMERRQTIRGRGRPKKTIREVIKKDLEINGLDRSMVLDRTLWRKLIHVADPT

SEQ ID NO: 440 - protein, 555 aa, synthetic construct
QLPPTDLIAHEIPLKLGAKPHAAKAGLYTKDEMKWMEEKFPRLQDGGVICLCSSPWSSKVKFVAKKTGKLRMVNVFVPLNNATEKVTYPMVRQEQVLDTVFKPGYNVYFTCDGSNAYWGIPIVERDQYKTAFNTPFGQFCMRRMGQGLTGAPFTYARFANTVFGPISETTPGAGDGEEQLDGDHSGANVLKSDAQRNIEQSEGQLGFNFSHFIDDTYGSTASFDEMASFLHRKFFPRIHFARMCLNAEKSEFFMPAITILGYRGGSEGIAPEERKKKLFQHYPVPTNAEELEAFCYLTPYLRRFIPGRAEHVRILKEALVEEKAKVSTATGEKEITKYMFIWTDRQQRSFESICQAIIKNTIFPVNPTLQVHVAADASQRGMGAVVFQLPGHPVGTKLTLSNRKDMRIIEYISQKFTPAESRYTNSEREAVALVKALREARLVVLGSPYPILAYTDHSTLTTLLNSDSVKGRIANWQTQLSEYDLRIVHILAKEMVLADGLSRLPDKVMESPSPEPDEDPEAQGLHLLRHDEGVQEVKDNYRCEVERTGARWIAS

SEQ ID NO: 441 - protein, 678 aa, synthetic construct
DKVFPTKNGAPRIMTEFVDRPYKFELRDEYTTGRNPRPLPSIKAMYYHGKPATQKVLEHFVRSTPVVSRCDNPRCLSRLVIVPKRDPGALKSADPTSYRVTMNALINECLKPTPSTLPLALNEIKKLHHYKYFLKVDAANAYWSIPLDDESRRMTAFQTHEGVFAWDRLTMGTRPASTVQQTAYYRAFDRYLPKELRHRYATFADDVAAGADTLEELFDLLKAIVICFQKAGIQVKASKLIFGVTEISFHNYTISKDQTRPKDENLDPIKNCAIPENVTNVKAFLGCTQQMAHYCQYYGLVAAPLHELTRDKVVFPKPWLAGTAYDISFNRLKSMMLNENLFLWNKVSGRRLFIEVDACDMQHEDEGRHRLLSKEPKRVVEWMSKAWTAHERELPCFYREALARLLCLEHFRNLIETQDVNAGTTIYTDHAPSTYKGSLSNKGRLSSWRIHETQDLADMVQTLYKAGAHLSPPHGLADSLSRLPRGQGFYRLQLPAVLDILLENLPTSVKELPNIRVNAEKDTVLAARIVQRWRKPRNPISIVRADAAGPCDFVILAPFADKITHKIASLIKMNRPFAALVPIDLLQEIDRGANCKVDEEVRKRRKQMPCIIISPLSLAWLVSHPEHTLLEKPSLVLFSQQSKEGTVTESGVLQSPDPSQDYLDFVDKSLMSLDALMK

SEQ ID NO: 442 - protein, 698 aa, synthetic construct
DKVFPTKNGAPRIMTEFVDRPYKFELRDEYTTGRNPRPLPSIKAMYYHGKPATQKVLEHFVRSTPVVSRCDNPRCLSRLVIVPKRDPGALKSADPTSYRVTMNALINECLKPTPSTLPLALNEIKKLHHYKYFLKVDAANAYWSIPLDDESRRMTAFQTHEGVFAWDRLTMGTRPASTVQQTAYYRAFDRYLPKELRHRYATFADDVAAGADTLEELFDLLKAIVICFQKAGIQVKASKMIFGVTEISFHNYTISKDQTRPKDENLDPIRNCAIPESVTNVKAFLGCTQQMAHYCQYYGLVAAPLHELTRDKVVFPKPWLAGTAYDISFNRLKSMMLNENLFLWNKVSGRRLFIEVDACEYAFDLSLGACAYQYADEPTDMQHEDEGRHRLLSKEPKRVVEWMSKAWTAHERELPCFYREALARLLCLEHFRNLIETQDVNAGTTIYTDHAPSTYKGSLSNKGRLSSWRIHETQDLADMVQTLYKAGAHLSPPHGLADALSRLPRGQGFYRLQLPAVLDILLENLPTSVKELPNIRVNAEKDTVLAARIVQRWRKPRNPISIVRADAAGPCDFVILAPFADKITHKIASLIKLNRPFAALVPIDLLQEIDRGANGKVDEEVRKRRKQMPCIIISPLSLAWLVSHPEHTLLEKPSLVLFSQQSEEKTVIESGESQFPDPSQDYLDFVDKSLMSLDALMK

SEQ ID NO: 443 - protein, 691 aa, synthetic construct
DKVFPTKNGPPKILTMYKDKPYEYELRNEFKSGSLQLPTVRSFDWDGKPATSKIIRDFIASTPVVSPCAHPRCISRLVIVPKLDPGQSKESLEHGFRVTVNALFNKCLKPAASTIPLATSEIKKLHNKKFFAQIDGLSAFWSIPVGEESKRLTAFHTPDGIYCWDRLLMGARPSSAVQQSAYLKALDDWADKIYHEHFPTEKDKHGLGPSIRARYASYCDDLACGADTLEQLYVLFFVLIEVCAKAGIQVKASKAKFGVEEITFHNYLINSTSTRPKQANLCPIRNFGIPRDVHQVKSFLGMAQQLSQYIELYSIIAHPLHALTKGDGSKFPKPWITGSPYDLAFHRLKAALLDPNRFLWHKEKSKRLFIECDASDLGFGAAAYQYANVISEVGEEEGLARLKDTSYKRVVEWMSKAWSTDQLKLPVFYRESLARLIVLEKFRNLIESNYELGTTVYTDHLPALFKSSLSNKGQLSEWRINEVQDLNSIVQTLYKKGPLLVLSDALSRCCQPETDLYDNDMPRKLAVLLDRLPDRIKHCKHIRVHYNKDTAAAGRIVQRWRTPKNPVSPVAPASTTLVDFVIAFPLDKGTLTIKDMLLRGQHFAMLIPVSTLCKIAQCPATCAILPHVQTMVDARPKIIIISAENLVWIMHFGDNNDCVQAQILLNAHGPIDDGNFGCGHEEAIEIMNARA

SEQ ID NO: 444 - protein, 553 aa, synthetic construct
DSVFPTKNGSPKILTKFIDHPYSYELLPEYERGEKKMPCTKAMNWEGKTYSSLVIRGFIRGTPVVEKCSNPRCISRLVIVPKLAPGQSKTDPNHGFRVCVNALVNKFLKPCASTIPLAADEITKLFNCKYFLQLDGMNAYWSIPVCEESKRLTAFHTPDGVYCWNRLLMGAKPSSAVQQSAYLEALDQYIDYDHNGQVRQCLLDKDGKRLLDSNGSPKTLRHKFAVYCDDIAAGANTLEELYDLYEALLCCCAKAGIQVKAAKIKFGVREVTFHNYTISEHGMKPKDANLCSIRNLGIPTDVTQVRAFLGCAQQMAGYCKELQIISAPFHKLTKKTTQFPKPWLSGVDYDLAFHRVKALLLDEKLYLHHNDPSKILFIEVDASDVGWGACAYQMRVPFEGDPKDEARMRVGDTGPRNIIQWVSKAGQIMNQGWTDHELKLPVFYRETLARLLVLERFRNLIETNISAGAALYTDHKPGLFEESLSNKGQLSAWRIVETADLQSIVEHHYRQGPKMLLADPLSRICAPSSGFYDPSLPSKFQALTKYLPESIKQ

SEQ ID NO: 445 - protein, 743 aa, synthetic construct
NSVFPTKNGSPKILTKFVNHPYSYELLPEYERGEKKMPCTKAMNWEGKTYSSLVIRNFIRGTPVVEKCSNPRCISRLVIVPKLAPGQSKSDPNHGFRVCVNALVNKFLKPCASTIPLATDEITKLFNCKYFLQLDGMNAYWSIPVCEESKRLTAFHTPDGVYCWNRLLMGAKPSSAVQQSAYLEALDQYIDYDWDGNIRKCLLDKHGKRLLDSNGSPKTLRHKFAVYCDDIAAGANSLDELYDLYEALLCCCAKAGIQVKASKVKFGMKEVTFHNYTISEHGVTPKDANLCSIRNLGIPSDVTQVRAFLGCAQQMAGYCKELQIISAPLHKLTKKATQFPKPWETGTDYDIAFHRVKALLLDERLYLHHKNPLKILFIEVDASDVGWGACAYQMREPFEGDPKDEARMRVGDTGPRNIIQWVSKAWSDHELKLPVFYRETLARLLVLERFRNLIETNITAGAALYTDHKPGLFEESLSNKGQLSAWRIAETADLQSIVEHHYRQGPKMLLADPLSRICAPSSGFYDPSLPSKFQALAKHLPESVKNIKTIRLYANKDTAALSRHVQAWRTPTNPISQGRLGSTEFVDNSNVFFIGVCHAEKSVDEIKELLSSDKQFAVLLPTGLLSEISRGENDDDKETFNSVIEKQIHSLSKIVLSQEGETWLIRVNDQPRIVEVLTAEQVGCDEVDATCIFESSLEELITQVTILPDWQEHNSEIAEERETHVGEACSPPAARRSSRNKRA

SEQ ID NO: 446 - protein, 506 aa, synthetic construct
GYTGQRDSRCTVVRANHPSAELPFAKELIDAEIAGELAKGRMAGPFALPASAQHRRQRGDHMWSSPAVPFAFFMTSPVAVVPKPGGDGWRIIDDLSKGDNAVNASIDEKVVKLRYEQFQAALDMVVKLGRGCELAKIDWKSAFRQIAVHADDCCVLGISWRGKLFFRLVLPFGIRSAPFLFTEYAAALIWKMRSLGFDVTYYLDDILLGGAKGTGKCAAAVAELERLGAKLGIQYHPTKRDGPTTTIVFRGIGIDTIRMVLFIPEDKVVKANRAIAAVLSAHNRHAFLKQLQKCVGLLNFLAMAVPNGRAMMRRLYAFFKKKYAESAEEFTIPVEVWEDLVWWQQCVQFTHQRTIFPIVAAEDSFQIHTDACQTGGGAVLFDRSFRIVGWFAFPWRSLPLSESMMASMPALEAFAFVVALLTFSPAIAGRRLLLSSDALTAVDALAWESSSSQHLTVLLRVAYATAINSSVLLRVVHIQGTRNILADKASRLFVDDDVQAMQQRRQ

SEQ ID NO: 447 - protein, 567 aa, synthetic construct
VSLDYDGQRTATVVNKNSTRQLVYNKNGLPSDPIPEYATSATKLLNVISHEVQEKLYLGPFTREEAEKKFGIFISSSIFGIEDLSRSTTKIRLIHNLSSSFFSVNNFVETEFTHTLDYTKLFFEALHNVANLSPSVWFACLDISRGYRRFRVRHQDIPLQGLSVPITTTTTVPSFDGTTSGVRQLLQGAEYFYFDTAMPFGARSAPQNFCTVSIAIRDLVRELAANGSIPGYLLTYVDDFSALAPTEADASYFLDTLRAILTEVNLPENPSKAQPSSLMTQYLGLEYDGVKLTATLPKLKRQLYIKYLQYFIDTRRIKWSDLNSLVHRLRHAASVLRAGKPFFSNLLVKLKSSKANANHYVTLSDRDRDDIRWWLHLLRHHKPQVVIGPSHWSSLESVGLYTDASKRGFGAYFTFNGSYFNGPFTPLEIAAFESNQVSIAEFELVVLCFAISTWGHLLAGKRLTFYCDNLPSVYSVNSQSSTIIVRVALLRHLFAIAAIHSIDVQSIWLGTKTNIIADSLSRFDMKTFHRLTKNVHTKQHQHPILTSRALLLTPDGRENPSNPEWRP

SEQ ID NO: 448 - protein, 709 aa, synthetic construct
VALEYDGQRDDTVVCKTRSKGLIVQKGAMPDAEVPDPITSAAALLNVVNKGVTNKTYMGPFNREEAIEKFGVFIASEVFGIEDTTRSTTKIRLIHNLSSRLFSVNDFVSGEFSHTLDYTKMFFAALSDIAATTPAVWFGCLDISRGYRRFRTRHQDIPMQGLNLPILSSSSVPFFDGDTTSTRHVAAGDELFWFDVTMPFGSRSAPRHFCAVSIAVRDIVREIALNAGVPGSILCYVDDFAALAPTKEAASFFMATLRSLLLAIGLPEEPSKAQPVSTTIRYLGVDYDGELCTATLPQVKRELYIRYLSYFVATTRRIKWKHLDQVVHRLRHAASVLRAGKPFFSSLLQTLRSRAHGSGGAARLERATGLRHGRVQHRGAYIKLSSTDKDDMRWWIHILSHHPPMTVIGPDHWITAADASIYTDASKLGFGAFFNGRWFNGSFTPTEIAAFEAQTVTINEFELLAVVFAISTWAHLLTARRILFYCDNSASVASVTTQQSRVPVRSALLRHLYAIAAIHSIDLKIVWLGTKTNIIADALSRFDIPLFQKITQDRFMLHHENEPALASRLLLFDPAGPQNPSSPEWRPMASISALSKQGSSAPLPPPLPLPLPHPLPHPLSPHPLNHHPLPAPTPLDCFETEEDALLHEFFKLVFTTEKMVSSHPSDWKSRSPSLPANVRAATFLALSDGQDFLLDMHLAKGSRALRHRA

SEQ ID NO: 449 - protein, 514 aa, synthetic construct
FTHKPYQKLVPHPYRFSSEIEDKIDKKINKYLEQNIMELADHENGEFISNIFFKEKPDGDIRILLNLTECNEYIPDRHFKMEEVRTVMSLIKQNCYMASVDFKDAYYCVRVHPKYRKYLRFFWKGKLIQYTCLPNGVKCAPRKFTKTTKPVIRKARENEASVSSFLDDTFIEGDNLLEAQKNVMTTVKIAEKAGFIPHPVKSQLDPKQILDHLGFTFNSLNMTVKITHKRLLKILEMCKNLIKKYQNKSHIKIREIASLSGSLVATFPGNQYGKLMYRKIDNFKNAKLRQNHINYSAKVMLNYNIAKEIEKVITELPSAYAPIIRENPDIILESDSSDIGWGGCFGDKNETGGSWTKSEIDSKNNYLELKAACFTILCFCKNIKNKHILIKSDNTTAVAYLNNQGGRIFKLNVLANEVWSWAQQTHNFITAEYLPGEENFRADKISRTMQSNIEWSLDQEIFTEITKEFGDPSIDLFASRLNNKKPDYFSWKPDPHAKNTNAFLQKWGTKLAYA

SEQ ID NO: 450 - protein, 511 aa, synthetic construct
QFCPNPSFPSPVISCPSCPLKYKALKDQINEYLSSGAITKVDPDESQILSRIFSVKKSNGKNRTILDLSKINTQIIHVSFKMETYINIMEIIQPRDYLASIDLRDAFFAVNLHNDSKRFCCFEFNGDRFQFEVLPFGLTCSPRIFSKVLRPAIIHLRSLGIRILSYLDDIFLCATSVSLLYEHIQLTLNLLISLGYAPNFEKSNLTPSNELMHLGFIWNSSNMTISIPSEKILKVQKFASSILRSSPTLRTLSSFLGLLVSFRPGYFLSPLHYRNLQLQLCALIKRGYNWDDKVTLNEKSVTDISWWSSCPNPLPSFYFGIFIPDVTLSTDSSLTGWGGVLSSGQSVKGSWSTSESKNHINFLELKAIEFCIRSFLPIIRNKSLSIQSDNMTSVFYMNKVGGTHSKPLCLLALSIWQLLMDNNISCKTFHIAGSDNINADFYSRSTKLDNDYSLTQYAFNSLLSHISFTPTLDLFASRLTHKLKSYISYHFDPFSVSSDAFTLKWPNNIYL

SEQ ID NO: 451 - protein, 509 aa, synthetic construct
PFAEYPPSCFLANNRSAFQHPDFVTQAISELLANGCIVEHSVPPFCVNPLSVAEGKKLRLVIDLRHVNSFLVRFKFKYEDLRSLSQVLEEGQWFFTWDLKSGYHHVDICLEHQMYLGFSWPFSGMLRYFTFTVLPFGLSSACFCFTRLLRPLVSRWRSMGHNSFIYLDDGLGSHPDKCSAAAAAMIQKKELNSAGLLVNEEKFHWHPMQVGEWLGLVINTITMSFHIPERKVEKLKSLLSSAIGDASSSYRELARIAGSIIYVALAVGPISRLLTRQMYLAIESRSAWDHTLRFSPALLEELRFWYNNIDSFNGYSLRPPPDSSMVVFSDASDVAFGGFSASLDGVVASGMFTSEDLSQSSTYRELKAIYYVLLSCAEQLRQKRVKVLTDNQGAARIVSVGSSKVHLQSVAMSIFDLCLSNRITLEAQWIPRSQNEKADLLSRFVDKDDWCVNPSVFRLLDAKRGPHTFDRFATYYNAQLPRFNSKFASPGCSGVDALAQDWSSENNWI

SEQ ID NO: 452 - protein, 517 aa, synthetic construct
PFFELPTPFLKANNASALSNSSFVSKAVNELLQANLVEEIFCVPDIVNPLSVSTRSFGKQRLILDLRHVNSFIFKQRFKCEDLSVAIQIFDQGFHLFKFDLKSGYHIEIFPAHQKFLTFAWDFGTGSLRYFQFCVLPFGLSSAPFIFTKMFKPLLKSWRSRGIPIAIFLDDGLGGGTDPVSAKINSLVVHSDLLKSGFVPNEDKSQWEPIQIITWLGVILNTIDGSIKATDERIAKLSHDLETLSTHQHPTRVHVKCVASIAGQIISLSSCVGPVARIMTRFLFSAISSAVSWDCEVLLTQDAISEIDFWRHNVHALNGKVYWGAKSLPAKITFSDASDSACGAFVQLQPGVELVSHKNWSIAESAQSSTWRELKAVCLALEAFASHLSCSKVVWYSDNQNVASILLNGSRKADLQLLAIQAFHICLQFRISLVPQWIPRDLNSRADLISRLIDFDDYELNDVIFQGLDELWGPHTVDRFACNYNAKLPRFNTKFFQPGSEAVDAFCQDWRFNSNWL

SEQ ID NO: 453 - protein, 517 aa, synthetic construct
PFFELPTPFFKANNASALSNGSFVSKAVNELLHANLVEEIFCVPDIVNPLSVSTRSFGKQRLILDLRHVNSFIFKQRFKCEDLSVAIQIFDQGFHLFKFDLKSGYHIEIFPAHQKFLTFAWDFGTGSLRYFQFCVLPFGLSSAPFIFTKMFKPLLKSWRSRGIPIAIFLDDGLGGGTDPVSAKINSLVVHSDLLKSGFVPNEDKSQSEPIQIITWLGVILNTIDGSIKATDERIAKLSHDLETLSTHQHPTRVHVKCVASIAGQIISLSSCVGPVARIMTRFLFSAISSAVSWDCEVLLTQDAISEIDFWRHNVHALNGKVYWGAKSLPAKITFSDASDSACGAFVQLQPGVELVSHQNWSIAESAQSSTWRELKAVCLALEAFASHLSGSKVVWYSDNQNVASILLNGSRKADLQLLAIQAFHICLQFRISLVPQWIPRDLNSRADLISRLIDFDDYELNDVIFQGLDELWDPHTVDRFACNYNAKLPRFNTKFFQPGSEAVDAFCQDWRFNSNWL

SEQ ID NO: 454 - protein, 516 aa, synthetic construct
PFYYTPTSVHLLNNKSALNYSDFVVNAITELLKVGSVVECPFPPVVVNPLPVSVQSNGKKRLILDLRHVNFFVKKSKIKFEDAKSFLECLLARPTAWACSFDIKSGYHHIEIFESDQQFLGFSWVFKGVTKYFKFTVLPFGLSLGPYIFSKVMRPLVKYWRSKALSIVVYLDDGISAAQSFSKCEEHSLLVRSDLFKSGFVPNKDKCQWVPIQVICWLGIFWDFKNNRMFIPPEKISRIFHELVEVMSCRSVSARKLVRVTGRIISNFLIMGDVCKLMTKAMHRLIERRNGWDAHVVLDSDVLIELKFWREHLQSLNCRPIWRKHTLPSRVVYSDASAVGCAAFISMNDRPVSHKNWDAIEIKQSSTWRELMAMCVKHSLQSFVHLLKGGHVKWYTDNQGVAAIVKSGSTKVHLHKLAMEMFSLSKEHDVRIDIEWIPRSDNEVADYLSKIVDFDDWSVKDSYFQAVDSTWGPFTVDCFANSVNAKVSRFYLLFFQPGSLGVDSLAFDWGQENCWL

SEQ ID NO: 455 - protein, 509 aa, synthetic construct
PFTCTPPPMKFKNYKSAIENNVFVDEAVSEFINNGCIQEVPFQPFVVNPLSVAIQKSGEKRIILDLSELNVYVAKNKIKFEDWKVALQFFERDCYMFKFDLTSGYFHLDICIEQQTYLGFSWNNTFYCFSVLAFGLTSAPYIFTKCLRPMVKYWRENGVNIVLYLDDGFDLAEGYLECKNKSDFVKLSLKQAGILVNEGKYIFEPVQSLEWLGLIWNSKAFSLKIPERRISDTIESLEKLLKLFPYISALTIITICRLSNFNVACNGQCYYFNDETFVFCYRKQTSWDSRLKVSDTNFVFEELLFWSGNLCTLNQNTLLNDSLPCTIVYSDASNVAGGAYTVEMNEKVFHQMWDEFEKNMSSTWRELMAIHVALHSFKSELQNKRVKWHTRQSELCIINKGSTKKHLQYLAYDIFKICSNVGITLNPIWIPRSENCKADFISKMIDIDDWQTSLEFFSFMNQLWGPYTVDRFANFYNAKLVRFNSKFWNPGSEAVDAFSQDWNNENNWI

SEQ ID NO: 456 - protein, 586 aa, synthetic construct
QWATGSPPRPFSQAPRLVDEAHCAWLLDKIQEGLETGAHGPLPLRRGRPDARWLSPAHVTTSAGKHRLVVAYTRLNDACQSATCRYETIEHLVDLLTPSSWLFSCDLSAAYHHCAIHKSHRKYTGFHFALPYRARGQILPLQVGGYYVYAPGASAATEPLYQVVELCAYALNFGARASPLVFTKHMRTLVKYLRKHAIGVVIYLDDLAFVVEGSQQAALRARDFIEQCIRSAGLTRHPSKGQFLCAQQVLEDHLGFRIDIPNNSLSIPERRCKKIRQLAVALRCEVARNRRLVPTQLLQQFCGAACSTSKAVPSARLHLRALYDCTSLHRPLSRLNRTALHDLHFWAELRPGNPANGVPLFKSPTSQVLYTDASGGTGWGGVLPAEPARRALCQARAQMPFADAASLHHAANIPCPEFLTGRTCAGFWDADTLPLHVTYKELHAFHRALRVWGPQLSQSRVLLFCDNQAVVSLLRHGSSRSAQLMAELRVVWKLLLDFGITLDPVYIRSANNPADAPSRYRDSSDWTFRPGLRRRLRDLWRSPFSLDPFATAATAMARNFCSLRDEEQHTAADGFSVSWSGHDLFL

SEQ ID NO: 457 - protein, 556 aa, synthetic construct
TWKKGPPKPFNHGVSLRELDLVSNQREFLKTETTRALGVGAWEPATCDRYVSKCFLVPKPGNKWRLVMDFRWLNSHCVDRRVKFETLKTLSRMAHKGDYMFSFDLQDGYHAIGIAPEDRKYFTFNLNGRLLQCSALPFGWNASPYVFVKTMKTLVQTLRSPTGVQDMAALQSLQDGPNRVGGRGTARFSHLTRQGGKNRPAVRGLRVLPYMDDFLVLAKTRKLANLAKLRVEAVLQELGLRRNVAKGHWDVTQRLEHLGMMVDTKTGLFQVTPSRMHKIRTLARETICLATRTNRLIPARQLARFTGLAQCVYLAVPPARHFLRELHNCVREKSSWSDRVRLTRQALRDLQWWVDLPAKWNGRAIWRSPISAVLHSDASMTGWGAVLNETTPARGFWNRQERKLHITELELEAVYNAVRSFLPHLRGRSVFVHEDNQAVVHMLAHYSTRSPSIMRRLRKLWLLLDLNDISLSRVEYIRSEANVWADALSRELDTEDWRLNPVVFKMLEERFGPHTIDRFASVTSAQLARYNSRWRDPYTEGVDSLHLDWRGENNYA

SEQ ID NO: 458 - protein, 547 aa, synthetic construct
PWTNGGPPPPFNQGVSCRGLPLDQAVFLKQEIERLTLSGVLRPVEHSRWVSRAFLVPKPNNCGWRLIVDLREVNKHCKTRKMKMETLRSLRLIAKPGDHWVSFDLKDGFYSLAIDPKDREAFTVNLDGQLLQFCALPMGWSLSPFVFQKLTEAFTDHLRDPESSTNSPGALAAEKMGPKALKKWRRRRRRLTGARLLPFVDDFAMFGETYEETLQLVVYTFSLLDSLGLKVHPTKGHFLPILVGDHLGMILDFEKGEFRAPIDKLKSVAVLAKTLLCRAAAHKRWVSVKTLASLARKAQFLHLAIPVARFFLRELHDVVKTAKSWSGTVKISCQLKRDLEWWTKVPSHHNGSPVWKPVENAYLHCDSSGYGWGAVLNDCVEARGFWGMPDLNEHITFKELKAVRCAIQAFLPELRGKRLLLHEDNQSVIGVLTHLTSKSPTMMCELRKLFLLIDTYDIKIRTLYIRSAANVWTDNLSRVTDNSDWQLSPRVFRHLSKLWGPHTVDRFASSANRQLPRYNAKWRDGTAEAVDSLHLPDQAWRGEHNWC

SEQ ID NO: 459 - protein, 557 aa, synthetic construct
DFHTRPPPFNQGNSLENLSEEEQAWLDKEVSRNLGSGSWVAATIKTHVTKCFLVPKKVEPGQPKKWRLVIDLRHLNDFCRDKSCKFETLKSLRYLAKPGDWLISVDLQDGFHAIQVRPDHQKYFTFCLQGQYYTSAVLPFGWKGSPAVFVETLQTLTRALRTPAAPTAAGQPVAFLNYLREECHVKHRPRTALSAAYRSPYWAVRLRVLPYMDDDLFLFRSKAEAEAGALQIRATFEYLGLKINEEKSPTLSAPTQELRHLGLLVNTVRGLFLVPKDKERRIRTMARGLKVQALSNRRLLPARLLASFTGLCQSVYLAVPYARLYLRSLHDDLSQKAHWEANVRLSRQSLRDLQWWADLRDQYLGRALWRSPDQAELHSDSSGFAWGGQLDYNLLAQGIWTLDEKRHHITVLELLAVLRNVQAFLPRLRSKTILLHEDNQAVCHILRNFTSRSPVIMLYLRKLILLLDTNNITLRPVYIRSEDNPADAPSRDRAPDEWKLARQLFDRLNATYGPHTIDRFASSATTQVPRYNSRYSDPQAEARNAMTQDWTHEINFI

SEQ ID NO: 460 - protein, 599 aa, synthetic construct
YWNALGPPRPFDKGRSLDALDQEQQQWLEREEERCVSSGAWKRVKGNRYVSRCFIIPKAGLDVLGRRQFRLIVDLRPLNLHCKDFKTRYETLSRLSSVILHGETVSFLSFDIKDGYHFLEIEKKFQCYFGMNIQGRHYQCSALPFGWNGSPFVFNQAMRTLTKLLRSASLPTAESMAEDLSGRQRSQLWGQHALRVGKRKVPVRELDRTTEMSKVRVPWHVLPYCDDYLLTVKGQSRRQRWKNAQRAARRSEKSLNFLGLQRHPQKGQWLKADQGPEHLKDSVRHLGLDVNTEGGRNEYLAPAAKFARIRQAARDLRGRAGRNRRLVPARRLAAFLGLVNSCRLAITPVEMFSRAMHDDLATRASWSANVRLSRQSLRDLSRWIDVPQEWNGAPISQSTVTKVVYSDASDFAIGGVLASEKISDPTRPGLQIPGKRWHRALTLEEQAEGIFVGEMRGLVETIENFAPELTGKVVRFMEDNQAAMFATRRLTSKHPLVMPLLRRLWALLCEHRIRLQHVDYVRSEENPADEPSRWRFSDEWKLSPAVFRWATRELGACTIDMFASRNTAQLPRFGSPWRDSQAAVEDAWSVSWAGEKVWI

SEQ ID NO: 461 - protein, 592 aa, synthetic construct
YWTNGPPRTAWNQGRSCDRLSQEEAEWMEREERRLVDIGAWKRVRHNRFVSKCFLVPKAGLDAQGRKKHRLIMDLRPLNIHCKEFKTRFETLSRLGTVIMEGETVAFVSFDLEDGYFCLQIDPEYQQYFGINIQGRMYQANVLPFGWSTSPYAFCTAMKTLTRLLRAAHLPTAEVVAQSLSGAYVEQCSELERLSGLRVGSTPVRAVELSAAAVQSVRPETDWLPYIDDYLATVRGATEVERAERAEAAKQHAEESLDFLGLRKHAEKSQWVPKPTTDHLGIHVDSTTGQFLATKVTMARIRREAGVLIARAKSNRRLVNSTSVRSFAGLVQSKYLAIAPAQLYLRSLFDDLSKDDWSASTRLSRQSLRDLQMWRDQSASWNGSPISKAPVTRLLYSDASEFALGGNLVEGDLSRVVPERPGLAVPGPRWHRALTLVEQQQGIFVGEIRALVENVENFLPQLRGQVVQLMEDNQAAMYATRRLVSKHPVALRLLRRLWVMLSANRIRLQAVDWVASADNPADAPSRWRFSDEWKLQPAVFRWANREFGPHSLDLFASRNTAQLPRYVTRFPDSKAVTCNAWAHSWVAETSWI

SEQ ID NO: 462 - protein, 554 aa, synthetic construct
PWLRGGPPPPFHHGESLLDATRAQREWLHAETERCLASGAWEPATARSHVSRAFLVPKPSPPGAPPKWRLVVDLRELNRYCRGVGCEYETLRRLQRLARRGDWMISFDLQDGYHAIGIHPDHRRYFTFSLPGLDGVPRYYQCAALPFGWNLSPYVFTKTMRVMVRRLRAPLAPARLPTWRGARGAAARALRLRVGSSHPSSVGMRVLPYVDDFLVLARTRAECFECRRCVERLLARLGLARHPDKGFWEPTQALVHLGLGVDTARGLFVVPPHKQAQISEQATRLLHTAARRRRLVSALQLASLAGRAQAVHLACPSARFYLREIHTVIASRSSWGALVRLSRQALRDLRWWAALPSAGVTRAIWRSPVACVLHSDASRRGWGAMLNSAVPAHGFWTPRERGHHITYLELMAVHRALLVFLEQVRGRSVLLWEDNQAVRHILTAGCSRSPEIMRLLRRVWWLLDSEGIDLRVEYFRSDDNVGADALSRIRPEDETALRRPAFLDLESRWGPHTVDRFAAPGSSLLPRFNSLIPARGVEAVNALAQRWDGENNYA

SEQ ID NO: 463 - protein, 563 aa, synthetic construct
EWTKGPPPAYNEGISFQGKQATQCAAEQAFLEGEIARLLGNGALEDAPLDARTHVCKAFLVPKKVPVGQPPKWRLVIDLRPTNLYCVHRGCKYETLKLLQRLARKGDWAVSFDLQDGFNAVAIHPDDRRYMTFALPPPAGSPPGTPPRYLRCAAMPFGWCASPLVFTKTMRVMVRLLRSPLAPTLERVRMRDRQARRYKVRLKKGQPHETGIRMMMYVDDGLALARTRAEALRCRNRISRVLAQLGLRRHPDKGEWEPVQRLEHLGLDVDFKAGLFLVPPRKIKGLQGQARDIMGEAARERRLIPARRLASFIGYAQSVHLACPPARFYLRALHDCLGSRQSWSSNVRLSRQAITDLRWWRTVGADADVSRAIWRAPEQSTLHCDASHLGWGGVLNMTVPASGMWTNRERGHHITHLELLAVHRSVAAFAKQLQGRSVLLWEDNQAVMHIITNRTTRAPAMMHLLRRLYLLLDTLGISIHSRYIASEQNSLADALSRGSPFDELQLRDAAWTEIETEFGPHTVDRYARLGNARTPVWNGRETAAKGAGAGALSQPWAGENNFV

SEQ ID NO: 464 - protein, 562 aa, synthetic construct
DWIEGPPPSFDHGVSLARPGDLPAAQSAFLEAEIRRCFGTGAWEAAPTDERSHISRVHLVPKKVPPGHPPKWRVVVDLRPTNACCRERGCRYESLAQLQRLANPGDWMISFDLQDGYHQVGIHPEHRRYMTFALPPPPDDPTGPPRYVCCAALPFGWTSSPRVFTKVMRGMVRLLRTPLAPSGADLRQAGAAQRRLVMRVRRRGARDPGDVGMRMLAYVDDFLVVARSRSLALRCRARVEAVLRLLGVQRNPTKGWWEPTQRLEHLGLEVDTAAGLFRIPPRKLLELEGQATRLRRQVMMTGRVPVRQLASFVGFAQSVQLACPPARFYLRALHDDLAARRSWQDSVRLSRQSLTDLQWWRQISAADVARAIWLAPEQAALHTDASHLGWGGLLNDSVPAAGIWTGRSRGSHINVLELLAVHRSLDAFLDKVSGKSVLLWCDNMTVVHILMNRTSRSPVLMQLLRRLWFLIDAAGISLTVRYVSTHDNNAADALSRGSPFDELVLRPSAWTALERRFGPHTIDRYASASNACLPRFNTASPGGGGEGALGLSQRWEGENNFA

SEQ ID NO: 465 - protein, 544 aa, synthetic construct
MTQAQSTFFEAEYQRHFLTGAWESAPPDERTHVCRVHLVPKKVPAGAPPKWRIVIDLRPTNRYCRPMRCRYETLKVLSSLARKGDWCFSWDLKDGYHQIGVHRESRRYMTFAVPPPPGSPPGAPPRYVRSAALPFGWSASPYIFTKVMRVMVRMLRSPMAPALRVARLRTRGGRAFALRLDSHHATAAPSVRGFRVLPYVDDFLAICRTRGECFAARRRAAEVMERLGICRHPDKGYWEPTQRLEHLGIDVDTGQGLFRVPPEKLKKLMDQARAIRGLSAREARLVPARLLAGFIGYAQSVQLACPAARFYLRSLHDVLATRAHWDARVRLSRQALRDLQWWEQIGTAEVSRAIWRSPIDRTLHCDASHLAWGGVLDATVPASGMWTGRACGRHINYLELLAVHHTLQAFGSQLRGQSVLLWEDNMTIVHVLTNRTTRSLELMHLLRRVHYLIDTMGVNLTVRYIASKENSQADALSRGSPHDELVLRPEAFRRLERRYGPHTVDRYATAANAQLARFNTLLPEAGGEAAMALSQQWAGENNYV

SEQ ID NO: 466 - protein, 558 aa, synthetic construct
TWKHGPPQPYNFGVSLRDTTPGQQEWLDKEMDRLLSTGAVEPAPLEECTHVCRVHLVPKKTPPGEKPRWRMVTDLRPTNAACIGQACKYETLRALQRLARRGEWMISWDIKDGYFAVGIRRDHRRYMTFALPPPLGMPGPPRYYRCAAMPFGWLMAPYVFTKVMRVMVRMLRTPTAPSLARLRRSAASGKALVLRLARRGRASGARGLRILPYVDDFLCICPTRRDALHARDRCTEVMDFLGITRHPDKGEWEPTQRLEHLGLDIDTEAGLFRVPPRKVVELMRQARDVLGRAKQEARLIPARELAGFIGYAQSVSLACPPARFFLRSLHDCLSTRTSWDGRVRLSKQALRDLAWWKRFDSADVSRAIWQEPAQSTLHTDASKLAWGGVLDQTVPAQGFWRPRDRSRHITYLELLAVHHTLQTFLARLKGRSILLWCDNLSVVHILENRTSRSPEMMALLRRVWWLLDSAGIDLRVRWISTHENTMADALSRGSPHDELTIDDAAWARLEHRFGPHTIDRYSNVVNARVSKFNTELPHPVSAGAQALSQCWAGENNYA

SEQ ID NO: 467 - protein, 561 aa, synthetic construct
DWLSGPPPPFDHGVSCGRGSLSKEESTFLESETRRLLELGAWEPAPAGERTHISRVHLVPKKVEPGQPPKWRIVVDLRPTNAYCRPRGCRYESLRCLSRLARRGDWMFSFDLQDGYHAVGVHPEHRRYMSFALPPPPGSPPGTPPRYLRTAVCPFGWSASPRIFTKVMRVMVQQLRSPGAATLERLRRRVGGGAAMRLRLGRQGDPWSRGMRVLPYVDDFLCLAASQAEALQCRAMVERVLERLGITRHPTKAVWEPTQRLEHLGLDVDAREGLFRVPPRKLRALMQHARSLRGMACRGRRLLPVRAIAGFVGYAQSVELACPAARFYLRALHDVMATRRGWDSTVRLSPQALRDLSWWAVIGSAEVSRAIWRPPHTRTLHCDASHLAWGGVLDGTVPAQGMWTGRACGRHINYLELLAVYHTVAHFFGELRGEHVLLWEDNTTVMHVLSNRTTRSPHLMHLLRKVWRLLDGAGIALTVRYIPSDQNVLADALSRGSPFDDLRLRGATWRELERRWGPHDVDRYAAPESARLARFNSVLPCGESEGAPALAQCWAGTNSYV

SEQ ID NO: 468 - protein, 562 aa, synthetic construct
DWTQGPPPPYDYGVSLAGRSDLTMQQSEFLEREVTRCFATGAWEEAPESERTHICRVHLVPKKTPPGEPQKWRVVVDLRPTNAYCRQCSCRYETLRVLQRLARRGDWMVSFDLKDGYHAVGIHEEHRRYMTFALPPAPGSPPGAPPRYIRCAALPFGWLASPYIFTKVMRVMVRMLRAPGAATFERLRRRTASGRAAMLRLGSRGDPWVRGMRVLPYVDDFLALAATREEALRCRERIEYVLNRLGITRHPEKGYWEPTQRLEHLGLEVDTEAGLFLIPPSKLKELARRAVGVMTVAAADRRLVPVRQLAGFVGFAQSVELACPATRFYLRELHDVMATRSSWDAKVRLTRQAFRDLRWWRRIATADVSRAIWRPPTDRTLHCDASRLAWGGVLDGTVPAQGMWRGRDRGRHINYLELMAVYLSLQQFYGELQGASLLLWEDNMTVVHVLTNRTTRSPELMHLLRKLWRLLDTAGIKLEVRYIPTDQNTFADYLSRGSPLDELVLRPTAWSALERRWGPHTVDRYATARNTQLRVFNSLLPEPASSGASALAQDWHGENNYV

SEQ ID NO: 469 - protein, 562 aa, synthetic construct
EWIASPPPPFDHGVSCSGPTGITPQQSEFLEKEIARCCATGAWEEAPIDERTHISRVHLVPKKTPPGEPQKWRVVVDLRPTNAFCRPKSCKYETLKVLQRLARRGDWMVSFDMQDGYHCIGIHPAHRRYMTFCLPPAPGSPPGAPPRYIRCAALPFGWSASPMIFTKVMRVMVRMLRAPSVATFERLRRMTRRGQSAALRLGRRGDPWVRGMRVLPYVDDFLCLARTRREALRCRQRIQYVLDRLGLMRHPEKGYWEPTQRLEHLGMDVDTAEGMFRVPPAKLSGLMQQAGAILAIASAARRLVAVRTLAGFVGYAQSVELACPEARFYLRALHDVMATRTSWEARVRLSRQALRDLRWWRHVGTADVSRAIWRAPTDRSLFTDASHLAWGGALDGTVPAQGMWVGRECGRHINYLELLAVYRSVMAFEGELRGSSLLLWVDNMTIVQVLTNRTSRSPELMHLLRKVWRLIDAAGISLTVRWIASKENSLADALSRGSPFDDLEILDAVWAEIERRWGPHTVDRYARPETARCARFNTLLPEAGSEGAMALSQDWHGENNYV

SEQ ID NO: 470 - protein, 562 aa, synthetic construct
EWMRGPPPPYDHGVSLAGPGAMTAQQSEFLEKEVARCFGTGAWEQAPADERTHICRVHLVPKKTPPGEPQKWRVVVDLRPTNAFCRPKSCKYETLRVLQRLARRGDWMVSFDMQDGYHCVAIDESHRRYMTFALPPAPGSPPGSPPRYIRCAALPFGWSASPLIFTKVMRVMVRMLRAPAAATFERLRRQTASGRAAILRLGRRGDPWVRGMRVLPYVDDFLCLAATRAEALRCRERVTYVLDRLGLTRHPDKGFWEPCQRLEHLGLEVDTEAGLFLIPPAKLKELMRQAGALLATAAKEGRLLRVRTLAAFVGYAQSVELACPAARFYLRALHDVMATRANWEARVRLSRQAIRDLRWWRHIATADVSRAIWRPPTDRTLHTDASRLAWGGVLDGTVPAQGFWRGRDRGRHINYLELMAVYLSLERFEGELQGSSVLLWEDNQTIVQVLTNRTTRSPELMHLLRKVWQLIDFAGITLTVRWIASKDNVLADALSRGSPFDDLTLTDEAWRELEWRWGPHTIDRYATAETARVAAFNSLLPEAGSAGAAALAQEWMGENNYV

SEQ ID NO: 471 - protein, 562 aa, synthetic construct
EWLHGPPPPYDHGVSLAGPNAMTAQQSAFLEKEVTRCFATGAWEEAPAAERTHICRVHLVPKKTPPGEPQKWRVVVDLRPTNAFCRPKSCKYETLRVLQRLARRGDWMVSFDMQDGYHCVAIAEDHRRFMTFALPAAPGSPPGSPPRYIRCAALPFGWSASPLIFTKVMRVMVRMLRAPAAATFERLRRQTASGRAAILRLGRRGDPWVRGMRVLPYVDDFLCLASTRAEALRCRERVEYVLKQLGLTRHPEKGFWEPTQHLEHLGLEVDTEAGLFLIPPAKLSELMRQAGAILAIAAKEGRLVRVRTLAGFVGYAQSVELACPAARFYLRALHDVMATRANWEARVRLSRQAIRDLRWWRHVATADVSRAIWRPPTDRTLHTDASRLAWGGVLDGTVPAQGFWRGRDRGRHINYLELMAVYLSLERFEGELQGSSVLLWEDNQTIVQVLTNRTTRSPELMHLLRKLWRLIDHAGISLTVRWIASKDNVLADALSRGSPFDDLTIIDEAWRELERRWGPHTVDRYASAETARVAVFNSLLPEEGSAGAAALAQEWMGENNFV

SEQ ID NO: 472 - protein, 728 aa, synthetic construct
LSEKFVLAQVSFPSTMAPEWQKELASTLIEFSDVLSWHEFDLGKITDVPCRINRKEGWTPAVDGPRRNLKLAHNRQIIQEKSLPLVKLGVFKPAPSTAVDRAQLHIVYRDKSKSPSSARVCHDYRKLNSTIVPDPYPLDTIPDLYAFMSEKEGHHCYFTVDADRGYFQIVNDPDTEQYTAFEMEDQLWITTRLVFGIVTGPAVFARNADALLGDLKHSERVLRNYFDDLVGKAPNEAALIQLLRRLFLRARQKGWKFKPKKLQFGFYDVKVFGNVFSRGTVSLTKERIDAVQALTPPTSVSELRSYLGLINTFRDRVPGFSLRTQALTSLLKLKPDSAGSKNRRPPFVMTPEALEEFSQLKTILLHPAVLQHFQPGRQTFLYTDASLGQRNEEINVPGGLGAVLTQVVDGVEVVCAYLSAGLTSAQRNYAIPRLEALAFVYAVGKFHALLDGVPFTWRTDARANQYLRDARHSSNPVLFRYSLVTQEYQFTVEWVPGLQMIADTFSRMTLVTADGAEALTLPEIVFGRDIGPRVAALSPTATLYTQKAYLPHLLFDSNLRSPSMEDVACYTAYSLSTEQLDPTMVSPLLVCEDFERATLAPTPEEAEAFSKIDQEPIIVADPVQYTKKDTTWLTALRLVRPLLLKEATIMARLRELKLWDGEESIGVPVSPRRPQSTASMENRPRIPISMLLNDDTLPDSSGYFATQVDPVRWVERLTKGERVFGLVD

SEQ ID NO: 473 - protein, 801 aa, synthetic construct
SKLDVGKTDLIECDMKVDTSHPSYKSQKQRYMPRDKLKVAQEAADVLLKSGVIQLSETPELKSNLCLVPRIEAGHIRDSTIAAKINQKNKQQGNTWRVCVDLRNLNACSIGNTSPSLSTLDSILAALRGKMVTNLDFSNGFFHIPLSENSKPLTAFYLGDKIYEFCRLSQGYIYSPTVFIKFMQRIFCKEEFELSKRILSPAELEIIKNMTSFEAISVNFMDDLWIHSPMELGFDGHLICIKLVFSALSRAKVKLGPKKCVFYTHDFKVLGIAVNSKESTMFIDEKKANAILMWGRPSSLAELNSRIFSLNYWEKFLPKLREIIAPWYLVLRSQQFYWDEHCEDAFNQLKMLILADIRLNIPNEDDQLILATDASKLSSSQVLFIRNKDGTLKICGCNSRIFSYQDSRRDANFKESISLATGFKVFGPYLSLSSKAPIILCDAKNLMYISRLKERSILANNLIMYLTDMAKLYEFQVYSIPGPINFLADLLSRAFSKSRFVNKNKYNLSKETAEILPNLNPLFSIDNETLVKYFQSEMLPEKDDKGNKHKNLPKQLEPLLTMYMNRTPEERYIDTILILKQITRRIKNSKLNSTIIVEGTKELKLSEDDIKHLLSHDTTRGSESKKATYVKPLLERIIDEYFGTDLDPKYKIRIRDALLDNFLKMRRIDSSSSYLNNMYEDLSIIVVEEINNNILYSYEHLNDIFINQNYKTYTEDIIEDDGTIIKIVPRFDENSLLEENSSYNIQLTEDLEDKNTSDNVSYSLNLKLLHSKVEKLDQIDILKNEKIKVYQNGKKLNIYFT

SEQ ID NO: 474 - protein, 759 aa, synthetic construct
GAPSSTLDGPKFDIEFAPNAQPVKHTLPKYSEDQKRKEAYHVDKAEKLGHLRTPNETQKSEWATRTHCVWKKDDDMGRWICDFRDVNKATVKKPIVIGDSHDLVRQLAQKKWKTMFDAWAGFNQVAATERAKKAMQITTSVGLRQWEVMPFGVTNGPSCFQGIMIDHFTPIAADLKEFEAAINFFFDDGALGSGSWDMPDSESDADNGFDQHLKALDVVFKRAAVINLRFKLSKCHFLQFAVPVLGEIAGLGKVSPDPSKTDAIRNWPRPSRAEDVERFLCTLSFFRTHVSPKFSEIAKPLRDCMSELHEKRAQGKYRKVVRGGDPHVTNRHGNASEHWPAFWNNECESAFNTLRDLAAKAVDLSVPDLEGAHNGTNPFILFPDACKFGVGSGLFQACPVNPELRKSHYFTLGCPTWSTKAAITLRFNELKRTYTKATNNSNKLSEIQVAFDVLGDTEKRAAYDLSLGLEKTHLSRIDLQPLGFVLVNRLTGAQVNWTTWDRELYAIVAPIDHFSSLVSGATCVLATDHLNNTVMNVDLKQPDKILRMLLKIHTKINPVWQFQPGRGQLGDGFSRNPPDRDKVRDAEADTARLPSTLGEAFELITKAQYRGGIEVDDCEELTQQFATMCERSADYIPFNSTDYLLSLPSFGPKTVEQHINMKQSVANRTSSVGVVNKSDFVLNCPSKTSLPYAMYKLPALLLPNANMTEDEVDDLNSTLTVRGPESELSVAVPFGTGGFRYTVTDAMGTGRWLEPYVPA

SEQ ID NO: 475 - protein, 452 aa, synthetic construct
NPGKCNCFEYRFQLQGRVPESRNSRPIPFALSKEVQEQVEEMLADHIIEESYSSNVNPLTLIQRDGKRVRICFDAREANKFMTPDRAKVPPVQMLLQRFHGASCISTLDWSSAFLQIPLEKTSNKWTAFQFQNKVYSTNLHAYHMGSEILSALLLGHFSQYWGADTSEYALHYVDDLVVFSKTFEEHLEHLDSVFRKFTTSGVTMNIGKCNFCKPEIKFMQFLQTRNQILITHNFQELNRPDPQKIEAILNYPAPHNHKQLKKFLGMCNFHQRFIVNYAEHVAPLLQLLCKNTPRKWSAEMQEAFVTLRDKFATTIHLVHPDGNLPYIINTDASAKAIGAVLLQQDREGNMNIVSTASRVLTPTEQSYTTCEQELLGIIFALEKFRIYIFGHKIIFYRDNKSLTFLNRCAITLNRVARGMVNLQQYNIRVTACKGGPQPFGRHNQPKSSRSK

SEQ ID NO: 476 - protein, 516 aa, synthetic construct
LQPYLDDNVKIDPSSFCPHPFMIVDLKVAPGATVYQRSYRPFSQSQQGEVDKQVEQWEADGVIVPAPPGTKHMNKLTLAARHDLDGNIIKHRVCLDPRHLNSLLEDTDNFLLPLITDVLEKSGGHKFYSTLDLKQAFHRLPLSKKSQPYTAFMHKNKQFMFARAPFGLKPMTSIFQRGMSLILGDLAFVAVYVDDIVIFSNSKEEHALHVQEVISRLTKANLIINPEKCHFFCTEVILLGFIIDRNGRRIMPQKIANIKSWAPPTNAKMVQRYLGMFNYFREYIPLYGTLSAPLDELRFRRGHFVLSDLQLECFNQIKYLISQAPVLHFPDFSKPFYVATDASNLGLGAVLYQLPNGPEDESVVHYISFMARSLKKHERNYPAYKKELLGIVFALKKFHYYLWGRPFTLYTDHKPLTFIKTQADLPATIANWTETILSYDFKCVYRPGLLNIIPDALSRAFPSELWPSPDPDPLVHRDKRRKAAVSTRSSFRAFSAPSSPELVVKAKDLANQMLEL

SEQ ID NO: 477 - protein, 704 aa, synthetic construct
EINPNISPEQRTNLLQTLYMSAYTCKFEEFDIELKHDNPCYRRQWKQPLALAHQKIIDFHIREMLQSGIIEPSRSQKYNSPLFIVPKKNNKNKNTLNKGHRGRNQNQEIDTSPDAWRVVIDFRAVNQIVKPYTVASKGVKQVIEEITTLPDNNEQLPKYFSVFDLFHGFYNLVLKASSRDITTFTSTDGLRYRFKKVPQGLNISPALFVSVMHRLYAQLRNQGRLNYYMDDLILYDHSFDSHLENINNFLQILIHNGLKCNPAKTQFAEQKVRFCNFDISSEGISIPDTSLKVLHNLVESVRDKRSLLRALGLINWFRLFIPNVSKRTQHLRNLTKKNVPFEFTQVHRSELEDVISVIKNATCLACYDPHKPIFIMVDSSMAGTGFIIAQDTATRQFGIDKTPEQRIQELRRSTFKLRPIFLALVQQLNPCENGVRIVMRKWSAHSLELHGLMRALQSCEHLILPGQDIFVLTDNSSIVHFNTLHFNNSRQKRLLAYLQYFRLQIFYTKGKKLERPDCLSRVFETMSENEISQFHPPEIEDFIFSINPKVYTEKTDECVSMQSFPETLTSGVINLLTNMNETTKNKLERSYPLSLKALFLNNNENICFDSVSDSLYTQMHEDNGPSEQSARPTNENSVSSTLNVNATNFVPKQSTYEESASSHVSVDNIINATRVLRRSSSTTDVNISNSECTPTGENISPLIE

SEQ ID NO: 478 - protein, 646 aa, synthetic construct
HPGDIGRVNDPRFLMDIILKDDNHPLPLELPYQTASNKKLACSRIVEGWLQSGIVERSFTRTHASRLTVASKHLNKTDFKKIVDRLQAEHGLDFSNLDQFEFSRIPPNLLTAYELSKGYRVCLDARALNNLTQDEIICSPNPDLMISELMFLPSYQLKLSANSDLMSNVPESLKKYFDTDIEDDDCMYYSSLDIRSAHTSLVLTERASHYLNVILPDYSLIRFLQSPFGLKTINSRWNSFITTVLHDLIQRKLVVIYADDLLILAKGRKLHRLVLIEVFRILKKYNVKLSINKCNCFVDKFQFLGFNFDSNGITLTDERISGILNLEQPCNLKGLQRILGSMVYIGRFISDLSTHLLPLTHLLNKNVPFILGKMTLKFIDADQELSLYCDSSKKAGGSVLFQEDKITKQPNPVCFFSRKYNTQQTQHYSSLELELINIIDSLSRLKAFINLSSKPIKLFTDAKAIIFLLKAVKEGPNPKLTRLASKLAEYQLNFQIEYCKPDGNQKFLIADFLSRSREKEDFENFPPPPPMQSFRKITKEHINHSLPKGANFTLTDLTEQVDKHPEWFVQFPTPSSPFLPALPASNGNLAFQGDNAQENSIFLPVLDPDSDSPKILHRLLFLRRDLSAAEIIKKQSEDKFICSFVD

SEQ ID NO: 479 - protein, 538 aa, synthetic construct
SPDEIGCVQPSMVAPMVIFTVPHVPWDLKPIPVPRALLPKLVTLLKEKMQMGILEPSMAPYSNRWFTVPKKSGALRFIQDMQPANRVTIRNKGSGPIVDEVAEAFAGQAIYSIGDLYSGYDQFQLAIESRDLTTMKTPLGLVRMCTLPQGATNSVAHMQSAMNQILRDFVPEKTIPFVDDIPIKGCPERVKDSTMDADGCRVFVKNHITDVERILKRLEEVDLTLSIDKSKFGFDEIVVVGHLCGRYGRKPNPEKVDAIARMKACRSTTEVRRFLGACVFYHIWIPHFAHMAEPLYKLLRKGTKFAWKEDQSLAMDGLKEILQSPPILQQVDYDCGTPVVFTVDTSPIAIGWAIGQDDAEGKRFAIRFGARILTERPRAYPQVKRELLGALTALKADRNYLIGANVVLETDCLPLLGMIANCSIPDIAMLRWIAYIKSLNPILIHITGKKNSVADMLSRARYVCEEEMETQEVDEDNEDDDYGYVLATSQANSDGEALPFRAELYEGRLRDIGLYLSTLKRQEGWMDKTFKDIRHQSY

SEQ ID NO: 480 - protein, 714 aa, synthetic construct
DNPGRVVTTAVPFTAVLKPEHDPKVTPGVKPFHEYRRPPPALATVMQQWVLDSVKAGILKPHRSAYSSPLFMILKPPKADANGWIDPDQPKKYRTLCDLRACNRALVEEKFPQPSCQEIFEKISPDMKIYSGLDLCSAFYQVPTAPDVWDYLSVVTPPTEIKERIDIQLTNGDRTVVEPGVYHSFTHLRLPMGMHASPSHFSNTLYDTLRRHVPEYFNTNILQFADDLCIMTETYQEHWDVLSALFRGLDSDGWTLARSKAFMFQRSLRFLGLIVSSAGVDEDGTTGVAKLYGDKQKVETILNLKRPADLTELRSFLGACNFFRIFVPAFSLIASPLVKMTKQGVNIKEQWGEEEDRAFRDLKLAIATAGAVTPYCPQKEVIIQVDAYRLGVGAVLCQIYGAKARLVAFFSKAYREPAWQWKGPGTDQLEPSSDNNKRPKQKPGSSKPPQALELRGIVEAVLHWRNYCIGNTVGIKILSDHGSLRYIESQRSKGLCSDQTERWCNFLSSVQAQVSWRAGAGLAVADYLSRHGHDERSWDELNWTSKYDGTDEGMKPANEVLKEASYDAYDFGASCDAAIDRKLYGGGDELMAGIPITDVLPLSCPDSERKFKGADLKMFVRLSQMCVDQTGLCGLDSRRFEVEPLNCGLSATDTAEGATLRPVDGRELALATVPVFKDLWEPEKLSVLRDTMEYDGKERLIQRARLEGWTDAQA

SEQ ID NO: 481 - protein, 815 aa, synthetic construct
NIPPEWTGGEPYADLKLERDSPPIQHQERRIPPLALPVVMAQIRAWLEAGIVEPSTSPHSSPLLIVAKKALAPPRDPKTGLPVAGWNPKPRWRVCVDYKTVNSRLQAVNMSNAPRLEVCLHQVASCNGYTFAAREHETRTGQSDKTKRWLATTADLCQGFHQLRIAPECRPLTAFTIPGVHTQEGHLQFVCCPFGLSTLPTHFHQVVGQAIGNLHYGDLPLSKEAPGSGQAPQQHQPDETGLEVEVDPEESWRILNQDPDNRPCASHYIDDVYISSYTTFEAHLASVRKVFKRLEAVGFGARVDKVEFAQTELQMLGWKVSEGRITTDTSKVHKIINEIGGNDDVLRDKKDVMSALGALNFYRSMIPNAGGISAPSTSLVVHRAALRALKTALLSDTFLAVPQENKEFYLVTDASVHSGAAVLAQVQPNGAEHPVSYAGTSFPETARRWSPSERECFTLLWGADYFKNWIRCGRTVLCSDHQPLIALARASTSNNSKLARWSARLAQYSNAVVSYRAGVCLGLSDTLSRLIYPAKVDTPDTRESLQATHRGFAPLENVDSIQGKGLRKFGLPLQRLSMLRPPTGQKWEDATRAYESARKQRDPPTTQPVMHEPDVLGEAVRQEKDQFSKHHDWFQPGAISADQAVRIMRYAMGTGEMAVLSEEELGSGDYYLSKWLDTTPLEKMMRGEGCYKTVADSDSDEQTTGIDDVDDAMSRKTVGDLFEEATGRRPDEEEVVYVCPLPETKRTHLWVAGKKPLDTNWEQLNMTTNMDVDTDYDSDENDDPLEALQQPDLEAWIQSQRFEDRDGREMRCNLT

SEQ ID NO: 482 - protein, 205 aa, synthetic construct
GLGKIKGVQASLHVNPEAQPRFYKPRPVPYALRKKVGKELDRLEEEGVILKVQHSEWAAPIVPVLKPNGTVRICGDYKLTANTATQTEVYPLPRIEDLFASLAGGKVFSKLDLSNAYLQLPLAEASQPLATVNTHKGLYHYLRLLFGISSAPAIFQRTMETLLQGLPHVCVYLDDIVITGHSQHLTWEWPQRPWMRVHADYAGPF

SEQ ID NO: 483 - protein, 501 aa, synthetic construct
EDPLAWWDKNEIQASLKLQKGKENEFVRYKPILMNQSDRKDMQMILKEHMDLKLISPGVSPYSSPGFLVRNHGEIKRGKPRLVINYQGINKILEFDGYYIPSREHLINCVQNAKVFSKFDCKSGFYQIKMEEESKKYTAFSTPQGHYIWNVLPMGLSNAPQIFQRKMDNLFKDYFSFMYVYVDDVLIASKTVKDHLRHLEIFSDVCFKNGLVLSEKKAVILTRKIEFLGIEIDESGIILQTHLVEKVRNFPDNLKTVKQLQSFMGLVNFAGMFINNLASYRKVFSPLLKKDADFKWIEEHKGTVQQLKKLCQNLPKLAIPNDEDGLVLYTDASDHWWAAVLTKVEPKGEVPCRYCSGLFADNHSARLFLLAKKFILKIDNTSVKAFLKNKIESKPEKARLLRWQAECQYYDFDVMVIKSHENILADFLTRDGATMEPHEANTILTRWRHQRESLEELNRSINSLAINAKAAGHVQEIDIKKVEAAMKATWLCNTSLWDSLI

SEQ ID NO: 484 - protein, 544 aa, synthetic construct
KYPQVVSLHGLDAGNLSLTLGYTQLRLREGEILPRAKRIFHVSPSDARHLDDIINLLIKFGFVMRSPPSPTGHHLYGMSAYLVPRAKPGCLGRLIVDFSPVNQLIESPSAVIPEINNTLQFLQGKVMYTSLDLRQAYMAMRIDEESQPLTTFLTPSGSYLFKSLPTGAAGSPALFAEASNRMLNFEPVLDQQGKPIFESPNVVKQDPSPLGHTISYFDDILVTSTSKATYEETLKEHFANLEETVKRLSFHGAKISVTKCDFSKIKILFLGWFVSHNFVVADPRRVQKVKDFAFPTNKKAVRAFLGLVNSLRKVVAMNVIEQVGILTPLTSSKTEFKFEQKHVKAFESIKELLTKEPLFCNLIDENAEKYLWCDAATGSGVLAGVLAQRIVGNKDDKIVPVHLDLENEVHQIIYDGSLPYEPCTLYTSLPIILPKPSLRKTIPPSIAKEHPLCGFTLENQIDSFFWSTLSVLALYSGGLTETVESLREKSVKYLKSSILNAQLKDFIFDMNWNNYNDFLTAYKAGKVGLDENLYLAKALAIYLQ

SEQ ID NO: 485 - protein, 790 aa, synthetic construct
KYPQIVSRHSLDRGHLSKTLGYFNLRLKENIVLPKNKKIIYESSADASMLRDVLDYLCKLKVISKASLTGDDIPNFSSPCFLVKRSSKDSAARLVVSYKLLNECISQDPITISNFDMILNRLHSAHCYSSIDLKSAFQSIELTPESKKLTLFSCMWGSYIFNTLATGMSVSPNALARFCDVMIHHIPSRDKNGKIQLNEKGLPIMINDRIPNVEIFYDDIIIFSKAGRTYEETIKIHFDLVEKVVSRLAFHRAKLEVAKSQLCKFKISFLGWLISNNYLMVDPRRVEKLNEKTFPYSAKGMKSFLGEVNWLRNTLNFQVLRNIHYLTPLTSTKLGKYNPNNIHREKFEELKKQLTQSCLFSKICLPGVPKILFTDAASEKYSQYSCVLAQIVPAKFSKNFVPSYIYLDDPTHRIIFDLKLPVKPVPLKKDNQTIKDYLINLESNYPPEYEYLDDDTLGYQEHFKISLSVCLKLMLELQNCVTKFESICFDLQKHIREHIMYNHILDTEHKGNKLSMKLYLEDIKKGVLKIDTGLHIFSALSNVLHRPVTLINATNKFNGKKLIRFNNDKNKPPFFFLLYEKNSNLIVRPTILNKHSEYNIGKHKGSFEIILYHSKVIPEEMRKTNIMQLELYAILGSLQATRKMVNSDELLLACDNKCLYYLYNQDVKDSHTKINNWGVKIEHDYPNLGLVFIKSENNPADFLSRVFQVSKPEIAHIKLPYIVKDSLNDYMPNQTTMTVKDWRVWVENNPQFIEVDKTKLTERQLESINKRDKNIAKGKEKGKEIKSNSF

SEQ ID NO: 486 - protein, 508 aa, synthetic construct
ELPDEPPPDRPIKQHIYLREGARPISSKPYRCPAPLLKRMNEHIQQLIAKGYVSPAPDSPWSSPIFFARHPRTGKLRFCCDFSEINKLLKPQHSVLPSVDDIHAQLKGAKYITTMDCLSGFHQMQIDEASRDYTSFDTAFGRLRWNYVCFGLKTSPADFTRLMQFVLGDALYNFALLYIDDITVFSQTFDQHIKHLRIVLDRLQKHTIYLRGSKCHFAGREVKLLGHLISGESVRPNPEIMDSIASWPTPTSPSELKSFLGLARFYARFTHHLSHTCEPLHHLTHKEFSRKNFPWGPSHDKAFGALKEALTSAPAVALPDPSLPFSIVTDASLFARAAVLLQRQDGVNRVIAYHSKGLSPSERNYSPGKRETLAFVKGVENFQDYLRIGHFEAWSDNIETVALATNPHLNSMEMKWRDFLAQFDYTHHHLPGLKNIADYPSRRPDYSFMEESVSAETSTSAHVTITPSPLPTDILSAVRDAYKDDKTATAIIASLETLGSASSFHRRH

SEQ ID NO: 487 - protein, 324 aa, synthetic construct
GHTDILKMKIDTGQHLPIKLKAYRAILHKREVIEKAVDEMLSANSIRKSISPWSFPVVIVDKKDGSKWFCVDFRKFNQITKANYYPLPLIDDILALLGNAKYYSSLDIKSGYWQIAMEDSDKEKTAFVCQKCLSEFNVLPFAVCNAPSIFSEMMGIVLEGLDTFAVAYLDDILIYSKTLGEHIKHIQVFDRLRQHNLKLKLKNCNFLQTETTCKIQRFNFGHMQNTKIQLWALGIAEYDCNIEYIPGKENMCADLLSRPQPRPEEMNKPHTDDNNLEPDINNNAFEISTINSNKFNSKLCLNLRNLSKKESKTKMKPHLQETDI

SEQ ID NO: 488 - protein, 738 aa, synthetic construct
GLSYNAGALPAVPFISARVILDPAKGPHVPYRAAVRVLNPIQRAGLEAKIRQWLSQRIVEESASQWSWPLISVAKKRRPGQLTPEYRFCADLRVLNNKVLADSLFTGSVPANLALLERHCIYSALDLYNAFESCELEPNSRDFFSFSSPSGQQFRYRRLPQGFVNSPAIMSRLTAELLANLPTSSREAKLSRLAPETQSTHGAQRVPGQQEAGNSIPVNTHDNTLHNTPQNIPQTPPRIKPMKHTPPINNSGTLGYVDDVLCYSMTLKDHINLLHILFHRIREANCRLKTSKCFLARKEVEYLGYMVGENGWGMCPAYRQSVVSWPIPTNKKELSSFLGRANYYRAFLQHYSDLTADLNKAKTREQTPWVLSPEEIRQFHKLQEAFNNSEALSFPNYDDLKLNPLIMDLDFSKKGLSASISQNQECSDKIFRERLLCNVSRKAPSELSVSSSHRGEISACILGLNSFRHLLLLAPFKIRSDSISVRYLSTLKDQRSPFPRYFQLLADFTFTAEHRPGRTNIPDDSISRRDDLPEMNRDELDFHSSQSFVDQLTLAQLEELEDIAIEFADPYPALWSSQTCQATDMWPSSPQDLVKTDIDTPPTNHQDHICAEIHPKLQYLNKIQEQFKGVVGEVTDKYLAKVWSSGSAGPPVVPTEPPGVPAGPPMVPVGPPAVPAGLPKGQAGPPSAPAVHPPLAPDRPTARQRGSTAQPDSSARQPDSSGQDRTPAPGRSGTAPRH

SEQ ID NO: 489 - protein, 724 aa, synthetic construct
GLSYNAGALPAVPFISARVILDPAKGPHTPYRAAVRVLNPIQRAGLQAKIKQWLSQNIVEESASQWSWPLISVAKKRRPGQLTPEYRFCADLRVLNNKVLADSLFTGSVPANLALLERHCIYSALDLYNAFESCELEPNSRDFFSFSSPSGQQFRYRRLPQGFVNSPAIMSRLTAELLANLPTSSREAKLGQSTPETLSSSEPTHGAQRGTGQQGAGNSIPVNTPDNTPHNTPQTPPRIKPMKNTPPLNNSGTLGYVDDVLCYSMTLKDHINLLHILFHRIKEANCRLKTSKCFIARKEVQYLGYMVGENGWGMCPEYRQSVVSWPLPTTKKELSSFLGRANYYRQFLQHYSDLTADLNKAKTREQTPWALSPDEIVQFHKLQEAFNNSEALSFPNYDDLKLNPLIMDLDFSKKGLSASISQNQECSDKIFRERLLCNVSRKAPSELSVSSSHRGEISACVLGLNSFRHLLLLAPFKIRSDSISVRYLSTLKDQRSPFPRYFQLLADFTFTAEHRPGKTNIPDDSISRRDDLPEMNRDELDFHSSRSFVDQLTLAQLEELEDIAIEFADPYPALWSSQTCQSTDVWPSSPQDLVKTDIDTAPTNHQEHICAEVHPKLQYLNKIQEQFKGVVGGITEDKYLEKVWSSGPAGPPVVPVGPPAVPAGLPKVQAGPPLAPAVPPPLASGRPTARQPGTTAQPDSSARQPGSSGQDRTRAPGTQAAPSR

SEQ ID NO: 490 - protein, 602 aa, synthetic construct
DLPSRPNATWPAGEEYARLRFKPGREPKSVRQFRLPEGVRPALRRTLEDMLRHGLIEPHDGTGINSPVLFAPKPGTTELRFCYDARNLNAAIADYHYPAPTTEEMLDKIARLKQEAVASGTSGQLWLSKADARHGFFQVSVHPDDRKYLAFSVPVLDGSYRYTVLPMGLKSSSFEFQRRMDGIIAPLANRSTFDYEITGQEHGRPVVKRGSAIGTACIYVDDLLVASFGSREEHEALLYKTFELFSKHNIVFKISKTVLFQHELEFLGHVITQTGVKQQPGKVDAIRNWPPLRSQDNVRSFLGLASYYRKFVDGFARISQPLSDLLRGPPSTFPAPLPPAAEQAFSALKSALTTAPVLMFYDASRETQVWTDASDYAIGGVLLQRDDKGEWRPVSYYSRRLLDSESKYSTYARELLGIRDCLLAFRWYLVGIRFVVKTDHSSLTWFLQQKELSGLQARWLSVFESFQLREIEYVPGEKNVLADALSRNPDPHGETFEHMVPPSDMPVPEEELHLKQASAVPDVPDVAAVKVPIQLQLWSPSDEPTVLGAVDDAAAWRAEGYNVSGRTINTASSYREAYPLCPDFKAIWAVRKKPDKMAELYP

SEQ ID NO: 491 - protein, 592 aa, synthetic construct
DLPSRPSATWPGEEYARLKFKDGVLPQSVRQFRLPEGVRAALQQTIEDMLRHGLIEPHDGTGVSSPVLFAPKPGSTELRFCFDCRALNKAIADVHYPAPTTEELLDKVARLKQEAAAAGATGQLWYSKADARHGFFQVAVHPEDRKYLAFSVPVLDGSYRYTVLPMGLKSSSFEFQRRMDLILAPLANKTTFEYEVHRREMCQVDGADVERVVTRRGKAIGTACVYVDDLLCVSFGSREEHESLVHQTFARFAAHNVVFKISKTVLFRSEIDFLGHTLTQSGVRQQAGKVDAILNWPSPSSQADVRSFLGLASYYRKFVDGFARIAQPLSDLLRGDASSFPAELPPPAAAAFADLKRALTTAPVLVYYDATRDTQLWTDASAYAIGGVLLQRDSAGDWRPVSYYSRRLLDSESKYSTYARELLGVRDCLLAFRYYLVGTPVVVKTDHCSLRWFLQQKELSGLQARWLSVFESFNIREIEYIPGEKNVVADALSRHPDPDGERFEHLIPPANMPGPTHCHAFEDAALDESPTVSRQPASTVDGAADWQREGYNVSGRMPASASTYDSLYAACPDFAAPWSSRHHPHAMTETYP

SEQ ID NO: 492 - protein, 640 aa, synthetic construct
SLPARPQARWPDGTEYARLRLQPGAEPRSRKQYRIPDALRPQLQKTIEELAAHGLIEVQSGSPYNSPILFAPKPNSTEMRFCFDSRELNKVLLDHPYPAPTTEELFDRVARLQHDAKLAGVEAPLWFSKTDARHGYWQIEVHPDDRPLLAFTVPVLDCSYQWCVMPMGTKSSAAIFQRAMDQVLAPFSNTNRFKVRQVDTPGANDGTVEVTPAAMGSVREIRAPEHRAGPVGWAFGTAFAYVDDVLICSMGSREEHVALVDAVMASFARYEFTFKLSKTDLYKSEMDFLGHRLTQHGLTRQAAKVEAIERWAVPTTQTELRSFISVIGYYRRFVDGFARIAQPLTDLLREGQFEYPLPAAAQAAFVELRALLSRAPILKYFDPQDETELWTDASGTAIGGGVLQRDARGNLRPVAYYSRRLSPSEEKYSTYQRELLAIRDCLLAFRFYLVGLPFVCKTDHCSLQWLTEQAEMSPLQSRWYTVFLEYDIKEIQYVKGEKNALADALSRHPDPTSQPLDYLVPPFNMDIASFHGLGLSPDTESLAGHHALPTPRQLFDAGAVVQPVAPLDCPIWQAWEERPGSSKPSSVSLTLDDWRAAGYNVSTIQPVFLTNFRDAYPACPEFGPVWASLSRGAAGHDIYP

SEQ ID NO: 493 - protein, 638 aa, synthetic construct
SLPAKPQARWPDGTEYARLRLQPGVEPRSRKQYRIPDALRPQLQKTIEELARHGLIEVQTGSPYNSPILFAPKPNSTEMRFCFDSRELNKALLDHPYPSPTSEELFDRVARLQHDAKLAGVDAPLWFSKTDARHGYWQIEVHPEDRPYLAFTVPVLDCSYQWCVMPMGTKSSAAIFQRAMDQVLAPFSNTNRFRVRHVQTQASDGPGEGELEVTPASMGSVRTDAPGGAQREERTGWAFGTAFAYVDDVLVCSMGTREEHVALVDSVMASFAKFDFTFKLSKTELYKSELDFLGHRLTQQGLTRQEAKVDAIRKWAAPTTQSELRSFISVIGYYRRFVEGFARIAQPLTDMLREGQFVSPLPPAAQKAFVELRERLSQAPILKFFDPRDETELWTDASATAIGGAVMQRDARGNLRPVAYYSRRLSPSEEKYSTYQRELLGIRDCLLAFRFYLVGLPFVCKTDHCSLQWLTEQSEMSPLQSRWYTVFLEYQIKEIQYVKGEKNALADALSRHPDPSTQPLDHLVPPFNMDTTRFNGLEARSDVELPSPCELFPSGALVQPAAPPDCPIFQTWEQRPWSVAPSSTSSCTLADWQARGYNVSIVTPSFLASFGPAYLECTEFGPVWQALSQDAAGNDIYP

SEQ ID NO: 494 - protein, 638 aa, synthetic construct
SLPAKPQARWPDGTEYARLRLQPGVEPRSRKQYRIPDALRPQLQKTIEELARHGLIEVQTGSPYNSPILFAPKPNSTEMRFCFDSRELNKALLDHPYPSPTSEELFDRVARLQHDAKLAGVDAPLWFSKTDARHGYWQIEVHPEDRPYLAFTVPVLDCSYQWCVMPMGTKSSAAIFQRAMDQVLAPFSNTNRFRVRHVQAQASGEPGAGELEVTPASMGSVRTDAAGGAQREERTGWAFGTAFAYVDDVLVCSMGTREEHVALVDAVMASFAKFDFTFKLSKTELYKSELDFLGHRLTQQGLTRQEAKVDAIRKWAAPTTQSELRSFISVIGYYRRFVEGFARIAQPLTDMLREGQFVSPLPPAAQKAFVELRERLSQAPILKFFDPRDETELWTDASATAIGGAVMQRDARGNLRPVAYYSRRLSPSEEKYSTYQRELLGIRDCLLAFRFYLVGLPFVCKTDHCSLQWLTEQSEMSPLQSRWYTVFLEYQIKEIQYVKGEKNALADALSRHPDPSTQPLDHLVPPFNMDTTRFNGLDARSDVELPSPCELFPSGALVQPAAPPDCPIFQTWEQRPWSVAPSSTSSCTLADWQARGYNVSIVTPSFLASFGPAYLECTEFGPVWRALSQGAAGNDMYP

SEQ ID NO: 495 - protein, 564 aa, synthetic construct
FREMPHKNNITRPDSEKMRIKFKPGMEKEIPAPRRAKCPKHLLPIMKKALEELLDNGFIKPSTSPFSAPVLMIVKPHQEGVAAADLEYRVVVDLRAINNLTIPLHHRIPDITGIWHSLAGAKYLSVLDLTKGFYQESLREDDENEDGSGGTSSSDKTAFCCEYGSFQFVGAVMGARNTPAFFQGKVELALRRAGLIDVGILTKDTTGKHIITKGVPCCTNFVDDLIVYSETREQHIKDLRRVFKCLSENQYYVNMKKCHFGCKYVLFCGGVVGNGVLAMDPVKVKAIDDWVQPMNITELRSFLGMSNYLKMWYSNYSDHAGVLTNLLKKGKCVQRDWCPECTAAFQALKMGFKSYPILRLPDFDKQFYLLTDSCATAIGGCVAQMYEYEGEGGTNKMVLLPVAYHSRKMTKHEINYSVREQECLAIHDCFKKFEYLLLGSKFEVVCKTDHSSLKQVQEGGTLQTSKRLARWAEYLGGFAYLVTWIPGITNLIGDGISRSLGSDTGTGYRGGGYMPSELAPINITTSYQGDARMDNLVYSGSKDFGAVYKLLADPAVDLDQHPEI

SEQ ID NO: 496 - protein, 708 aa, synthetic construct
QTPISVHTPLDGDPLLHIHRRADAPPLKRAFIKTAVPLLPHLREFIESMTAARFIRPSVSPFSAPVLVIPKPLNPDGSSRGFRLVTDYRALNAQVDAVQHHIPDVHAMYEKLRHAKYVSTLDLKNGYWNAGLTEESKHLTAFSTEFGTYEYNVVPQGLVCSAAHFQKWVETKLRRHGILFEHVSVNPTLQAGLNTSALFDDKNRYIGTQPIGIAKMKGESGFVAVYIDDLIVFSGSEEEHARHLIKVMEVCSNEKLYLNTSKSHLFCKYTRYLGAICGNGELFMDPKKVEAIMKMPSPTESQTQIREFLGSCSFYRRWIDSYARLTTPLTELLKDTAKGKTRELWDKDPIKYETVIKQLKDALCSYPVLRQPDFDLPFVLYTDASDYAIGGVLCQLRENKMCAIHYVSRSLQGPEKNYSVQEKEALGIIFCVKKFRKMILGSGFKIRCLTDHRSLECLTNSKEVAGRMARWAMIMSEYNYRVEYIKGCTNTAADSLSRLIKIPEGRWTPLAPDDSDSDSEHPFLLLWPETLLLLSTYQQYWAQNDDVGNLSEHDLLMAFTEDHQIWLKKEEKFNHPLCDIDAMEQVLFSRSTVYTGDITVMTVTKELYCKCSDFADLHKYLSDIQQSKIVQSPNDYDTNPVAPPSKRQLALPMVTRSSDTEQDPPQWGLNGPCTDTRQPRGNDNRQAPAVPDVTPKRVPRSVIKAKRK

SEQ ID NO: 497 - protein, 657 aa, synthetic construct
FKDGKHGQFDCGKPLEFFNPHPDDVPAKIQLRPDAKVPPICRYRCPNNLLPEFRKYIQEMLNKGWISPGESEYSAPVLIIKKPGTYDDGSSKGFRFVSDFRAINKIVAPVTHYLPEISEMWEKLRSAKFMSVCDVRHGYWNVGLDDDAKRFLAISTPFGQTYVYNVLPQGFINSSAIFQRFLERKLRKHKILYEPKISTIRGEDSTECAGGDKTDGIDAITSDLSGVKIDTKEPNNFENEYQGFCSCYQDDIILWSASAEQHKSHILKLMKVLSEEHIPLNIQKSHFFCKFTRYLGAICGDGKICMDPEKTASVDTMVVEKNETSIRCFLGMCGFYRRWISQYARMAKPLSDLLCKDVNISKQWDERADKAVQNMKNALTTYPVLRQPDFKKPWIVCSDASDYACGGCVSQEHDGKLCPVAYCSRAFKGPELKYTVQEKECLGVIYCLKKFTQYITYCPAFQIRLMTDHYSLQFLHNQKLIATGRMARWAMELAEHNAKIYYVKGRTNYTSDCLSRLLDLSETEFDTTQNLMVLYPRFQLMIQKLLTHRPSVEGISSEIDEEKYLSFWIKKASEFDKKLDNFDISCKTNNTRSDGNAPHECVLFSTARVSINTKPLSITHEMYLKCPDFGLIYQCLHDKYKDTVSKENFKKVKHRLK

SEQ ID NO: 498 - protein, 888 aa, synthetic construct
LHKFNPTEFDMQNAMRINLKVGAEAPPPEFRKQGHHMLEIIAAQIKEMEDAGWVYRGKSVTACPIHMVRKGGTGPGEKPKWRITCDYRELNKVIQNHSYPLPEVNETIRAVREQACESHRQDLERGVANPDIPAGIDPKGHDPGVSFISVGDLAKAFYHMPVHPDDQYLTAFTVPGLGTWMYRGAPMGVKTTPSCWTEFLHKKLRRHGCLFEPGMYDPKDVIDAPETRMNDGGPRPHSYLQVYIDDVIIVTASQETHVRAWEHFIKVLEYERLSMTESKIEIGVKYLRYLGHIISHSEVFSDPKKVEAIMDLRTPRTKKECRCWLGCCNYYRPYIVNFGTIARPIIDLTTDRFGNDISAEWDSDPRYQKAFDTLKEKLCEYPILRLPDLSKPYVVCTDASNFGLGAALCQRVDGKLVVIEYASRSLVDAEQNYTATEKECLAMKWAAEKWRLYLLAAPVTFRIQPRMDKMEEVSLQAAETKASAQHRIPKGAVVMDTPNVTFQTDHSALTQLPRKRVISNSRLAGWVTSMSEFEYDVQYIPGDSRSLDTADCLSRLIRMDDEHDADKRSESARWQYANCWTEVYAKLFDRLKADDVSTIIASAPGCRDAEDTGLVNTVNATEGSKPEGGGECPDGWYPETDVPGWNNLGDIDYYTDVELQLPKYSGITEAAVQELSYGEGGGCGGEELCTAFENSFLSEFCQYGQGELTATQHTVRINNMRSSAPVCAIPILEGHDCGDCTVQPRGAEILCHQALQDEFERCHAHAYEHNTFSFAQCDGTPPEGHIYGIFAGMGEQIGDWFRTEENATLSGIAKCTGVSQHELVTFNQRHPTVQFPEPHAQPFNDKGQPRQYLRAVPFKADTWIQLTAEPAQGPEELLEGEQVRDSHA

SEQ ID NO: 499 - protein, 515 aa, synthetic construct
QHQFNPSRFDMEHAMRINLKKDCEPPPPEFRKQGHHMLEIIAAQIKEMEDAGWVYRGKSTTACPLHVVRKPTAPGEKQKWRITCDYRELNKVIQNHAYPLPEVTETIRALREQACESHRQDLENGVENPDIPAHVDKRGHDPGVSFISVGDLAKAFYHMPVHPDDRYLTAFNVPGLGTWIYRSAPMGIKTTPSCWTEFLHRKLRRHGVLFEPGMHDPDDILDVPETRMKDGGPRPHSYLQVYIDDVIIVTASQETHVRAWEHFIKVLEYERLSMTAPKIEIGVQYLRYLGHIVSHSEVFSDPKKVEAIMEMPEPRTKRDCRCWLGCCNYYRPYILNFGNIARPIIDLTTDKFGKNIAEEWDSDPKYKQAFDTLKQKLCSYPILRLPDLSKPYVVATDASDSGAGAALCQRIDGKLIVVEYASRAWTPAESRYTATEKECLAMKWAAERWRLYLLAAPVTFRIEPWRQHRTRTRVNLERTMSKQRFKADTYLKLCAEPETQPEDYEDGKLVRNSRQ

SEQ ID NO: 500 - protein, 477 aa, synthetic construct
FVHDPSKWDLENPMNIELREGEEPPPPEYRRMGPNMLAICAEQLKEFLKAGWIYRGAARTAAPVLMVRKPNADATADVKWRVTIDYRKLNNVIRKKAMDLPTCTGTIHTIREQACESYRQVIANKNGTRTSIHTDHSDRMTPSPDPGRSFLTVTDIVKAFHRVCVTPEAQELTAFCVPGLGVFKWNVAPMGLATSPAEYVEWFTKKMKRYGVLYRPGDHEPSEVLDIPELNITDGEPSPQQYCQVYIDDIILVACDIDEAVRQVKHMVRILELEKLYISLEKTVFATTWLRFLGYIIGHTDTFADPRKVEAIQGIMPCTKEHPWSKTATKSFAGMTVYYRMFVMDYAKLMRPIHRLVRDDVTPDSNVSAFWTRRLPKADPNYETEIENALGQRSPRVKEGNAYELTTQEGFEEVKRRLSQYILGRQPDPRKPFTIATDASQYAAAGALCQEHKGKMVPLEFFSKAFNKEAQRYTTCS

SEQ ID NO: 501 - protein, 802 aa, synthetic construct
FVHEPSKWDLENAMKIELEEGENVPPPEYRRMGPNMLAICAEQLKEFLKAGWIYKGAARTAAPVLMVKKPNADLKAEIKWRVCIDYRKINAVIRKRAMDLPDVPGTIHTIREQACESYRQVIANQNGSRTSIHTDLPQRAAKSKDPGKSYLTVTDIVKAFHRVCVAPESQDLTAFCVPGLGVFKWQVAPMGLATSPAEYVEWFTKKMKRYGVLYRPGDHDPRKVLDIPELNMTDGEPSPQQYCQVYIDDIILVACDIDEAVRQVKHLVQILKREKLFISLAKTVFATEWLRFLGYIIGHTATFADPKKVAVIKDILPCSKTNPWGKTAVKSFAGMTVYYRMFIMGYARYMRPLHNLVKDDIKPDSDISAHWTRRLNPTDPAYETHVENVFGQRRVRELETDTKSKKIHALTAQEGFEGTIKMLCLFIMGQQPDPNKAYIIATDASQYACAGALCQEHKGKIVPIEFFSKVFNKQAQRYTATERECLGLKHALENWSWYLLGSKFNVVLYSDHQALQALAKSKINNTRISNWQLAISPYRFTVQYKPGRSAIMAGPDCLSRLLQESWKHYRNNDNEWTTVDFYDEVPAFKQLFEKLESDDRDFLTPKVDTETVSVYQKGGGKKVSSEISAIFEIQQDRSAKEQQSFLDEGHERPQLVESLWDPVRKEDSPPGTPYDHAAERQNAYKYQQAIEYGVHTIALDPYGTTANDVMYMAEGLPLDFDDSTPDKGAIHGAQGRLKGDMYNASNNDMPVSIAKRFNINLKKLLHNNSMQHPGLKAKSKLKANTPIILQNRVIGERTMQGA

SEQ ID NO: 502 - protein, 797 aa, synthetic construct
FVHEPSKWDLENAMKIELLEGENVPPPEYRRMGPNMLAICAEQLKEFLKAGWIYKGAARTAAPVLMVKKPNADLKAEVKWRVCIDYRKINAVIRKRAMDLPDVPGTIHTIREQACESYRQVLANQDGSRKSIHTDTPKRAARLKDPGKSYLTVTDIVKAFHRVCVAPESQDLTAFCVPGLGVFKWQVAPMGLATSPAEYVEWFTKKMKRYGVLYRPGDHDPSQVLDIPELNMTDGCPSPQQYCQVYIDDIVLVACDIDEAVRQVKHLVQILKREKLFISLAKTVFATEWLRFLGYIIGHTATFADPKKVAVIKDILPCSKTNPWSKTAVKSFAGMTVYYRMFIMGYARYMRPLHNLVKDDVKPDSDISAHWTRRLEITDPAYETHVENVFGQRRPRELETDTKTQKIYALTAQEGFDGAIKNLCLFILGRQPDPNKPYIIATDASQYACAGALCQEHKGKVVPIEFYSKVFNKEAQRYTATERECLGLKHALENWSWYLLGSKFNVILYSDHQALQALAKSKINNTRISNWQLALSPYRFTVQYKPGRSAIMAGPDCLSRLLQESWKHYRNNDNEWTTVDFYDEVPAFKQLFERLESDDRDFLSPKVNTETVLESKKGGGKDTTIFKIQQDRSAKEQQSFLDEGHERPQLVESLWDPVRQEDSPPGTPYDHAAERQNAYKYQQAIEYGVHTIALDPYGTTANDVMYMAEGLPLDFDDSTPDKGAIHGAQGRLKGDMYNASNNDMPVSIAKRFNINLKKLLHNNSMQHPGLKAKSKLKANTPIILQNRVIGERTMQGA

SEQ ID NO: 503 - protein, 588 aa, synthetic construct
GAPLRRIHGTEHHINTGNAPPCYKPPYRMSPSELQAVRDQITAMLKQDIIRPSKSPWGAPAILVRRKDLHGKHQPPRFLVDYRALNSVTKSDGFPLPQVIDILDWLGGGKTFAKLDLANGYWQVPVREEDREKTAVVTHCGLFEFISMPFGLKTAGATFQRLMQATFSDFLMGNVTGSSDNQTGFCMPYVDDLIVRSMSDYGALEHYEQIFKRAAQVGMQFKPSKCTFFSTHLEVLGHIVTPNGRIPGPKKVQAISDFPVVNSQTAVQKFLGMVGFYRHHIPSFAQRTYHLRELLQKDRKFQLTAQVEAEFNDLIAALTGPDVLLRYPDWSKPFHVHTDASQLGVGAVLMQDDQHHLRPLQYASQAFSPTQKRYDTREQELYAVKWAVEQWHPYLLGRKFIVETDHANLKWLCSIAPHKAKLARWDSSLAEYDFELRHRPSRSNTIPDALSRYPVTQFIRSENSVSSATFVDILPPADVSAYLVTALGLIPYYFAPLTSTISSFTTAFALTTADTSTSPPTKAEHLSTTSQTEEPLTLLGSNRQDFITLQLQDPTLKLVHKYLSAGSKKSALHDLSSREQTRIQNLAR

SEQ ID NO: 504 - protein, 635 aa, synthetic construct
NAPSQTHAIEVHLPLKEGAVPHRHAPPRLGVEGRRFVRENVADMERRGIVYKTQSPWGSRIVLVRKKDGSLRQCIDYRDLNAKLLVQDSPLPRIDTCLEAMTEGFFNEQIAQLKKEAESPLQGAQDGSTTTTAEPADTVEAPSQPDMAGQFTNNAKFHRGAPRYWCTMDLASGFHGIPIAPESQPQTAFVTPDGKYAYTRLPFGLQCAPSYMVNLMNEVMQGLQWSICVCYMDDTLVWAQTFEEMMERLELVLERFIGANLSLKAKKCVLFATKVDFLGFRLSNQGIEVSPEKVETIRKINSEAINTLTAVRSFLGAASFYRKHIRGFASIAKPLTELTRQGVDVPVESQKEPAQTAIRTLKDALTTAPVLALPRWDMPFIVHTDACITGLGAVLCQRDEEGTERPVAYWGRVLTPAETNYNVSELELLAIISCIKHWRPYLWSASGRKFILRVDHAALLYLHTAKDTVGGGPASRLQRWYLKLQEYRFEVWHRPGRIHYDADFISRMQGSPEYARLTQEADTPDWARASEESVRRHTAARGPSLASQDTESPPEQPNVGDATTGGAALEEGGRVPHGKEEGPGKKNKTETGSPGNPSTDTETREIIALVSTDRAPAGSQLALDLSVQETFDLLA

SEQ ID NO: 505 - protein, 643 aa, synthetic construct
NAPSQTHAIEVHLPLKEGAVPHRHAPPRLGVEGRRFVRENVAEMERRGIVYKTQSPWASRIVLVRKKDGSLRQCIDYRDLNAKLLVQDSPLPRIDTCLEAMTEGFFNEQIAQLKKEAESPLQGAQEESSTATAGQAEAAVAPTQQDMADSPENSAKSYRGAPRFWCTIDLASGFHGIPIAPESQPQTAFVTPDGKYAYTRLPFGLQCAPSYMVNLMNEVMQGLQWSICVCYMDDTLVWAQSFEEMMERLELVLERFIGANLSLKAKKCVLFATKVDFLGFRLSNQGIEVSPEKVEAIKKINSEAINNLTAVRSFLGAASFYRKHIRGFASIAKPLTELTRQGVDVSVESQKEPAQTAIRTLKEALTTTPVLALPRWDLPFIVHTDACITGLGAVLCQRDEEGTERPIAYWGRVLTPAETNYTVSELELLAIVSCIKHWRPYLWSASGKKFILRVDHAALLYLHTAKDTVGGGPASRLQRWYLKLQEYRFEVWHRPGRIHYDADFISRMQGNPEYARLTRDVDTPDWARVSEESVRRHTAAHEQGSVSQDPEVQANPPNAGNATTGGAALKEGGRVPQDREESPSKKSEAKAETLPPTNPPTDAETREIIALVNTTRAPAGGRVSQAPATSEDLSVQETFDLLA

SEQ ID NO: 506 - protein, 621 aa, synthetic construct
TTSLDTLGQYSGPMGPFTFKLTTADLSSAYQRRRFQSPADTDVLRKELQKLIGSQIIEPSKSPVAANPLIVRKKDGSARVCIDYRDLNRITEPNRQPLPSIPQLFHRLLSERKANIFSTLDLAQGFHQLPIAPKQRFLTAFYGPDNKLYQYRVMPFGVRNGPPEFQPRVEEAVADEPSAFVFIDDITVGSCISDLLFHPPVQEADSSGLPTQHELVPQSWDFDVDVHLRDCRSTCLALKRSGWTIKWQKCRWGYFVAQQLGHYVSSFGLQPMADKIAAIVSVRPPTTPTEIKRFLGMVNYYRDHLKDLSAIAAPLNALLRKDVPFLWAAEQQGAFEHVKRLLISAPVLRPADVFKPFVVTCDWSAVGMAGTLEQVDEESRLYVVEYWSKTCTPAEAKYGSFKGEAATLVFVTQHWRHYLVNNLENLLRSDNSALQWLTSSPNLPAQAARWALLLHDVAFRVVHLPGKDNVVCDFLSRPCGAASKPPTAPLGCGSRSWSSSTRSPSSPTASCVCSSSVYPATQCGPSAPVSGEVRSVTAGIPASYEPDPKEIVATFCSGVFVIFDDNGPVVSSSSPSREVWFDTNTLDYLRAAAGPSPETACAAQLLRLLPVEKARVVSRSR

SEQ ID NO: 507 - protein, 521 aa, synthetic construct
EASHEFPPSRVWDHAIELKPGAPSSLPGKLIPLSQPKLAELRKFIKEHLGRGTISPFKSPYTVSFFFIKKKDGKLQPIQDYRPINNWMIKNKYPLLLIPQLVDCLRGCSLYTKFDIQWGYNNVHIKEGDEWKAAFMTNEGLFEPTVMFFGLTNSPATFQAMMNSVFAPEIAEQWLTVYMDDMAIHTAKLPDKMDEQHLQHRELVKRILAKLQEHNLFLKPEKCTFKQPTIEFLEVKVDQGTVQMDDVKIAKVKNWITLHNVTEVCKFLGFTGYYRYFIQDYSKKARPLLYLTHNSTPWQWGQDQQMAFETLQDAMCNKPVLRQPDFTKPFYILTDTSAYGMGAILLQEGKSAILQIETPHKKPELHPVAYYSTTFTETECNYNIYDRELLAIMKAITHWRPYLICMEEPFTIYTDHANLLYWKSLHKLNQRTAHWHSELQDYHFMLEHIPGKTHTAADALSRPSGSDKGKQDNQQITILPEATFIQLADADSDGSLESMITDCESQYEATMKEWEDTYPIT

SEQ ID NO: 508 - protein, 695 aa, synthetic construct
GPPSGLPPDRGIELVLETGSRPMPRTRPLKRLSEGELAELRRQLRDLLDRGWIQHSTAGHAAAVVFARKPDGSWRICYDYRGLNAITEPQVEPLPHIDSLLDETRGAKWFTKFDLAQGYHQVRLREADWWKTSFRSQLGQFEWKVMPFGLQGSSSVLMRVMNAAMTRGLRTNAGGEDAESRPGDTSVPGAIARSDLTQGHRGVPGASGPLHRSVVVYMDDLLCYSSSLEQHLRDVREVLAILRQEKLYVKASKCAFGREELGFLGHRVSGAGVSVDPRKVAAVREWPAPPSNVELRQFVGLCNYYRRFVKGYADIAAPLTRLCGPHAPWHWGPVEQQSFDTLKCCLTTAPVLRTFDPGRRSVLTTDASETAISAVLTQPDDAGHHHPVAYESRKLAAAEQAYLPHVLELLAVVHALRVFRHYLLGSGAPRPPGVLSDFTLRTDNQAVSWLRTKRDINRFMARWLDEIEEFRFDIEHVPGRLNPADPLTRRSFPGAAGTGGGPTAVVDPNLTTAVAAVFIPDSTAAPGQGQGLAAAAGPTPTTAAAAVVTPGSAGTAPGPGGLAAAAGPTPTTAAAAVVTPGSAGTAGLREGHDVANGPNPTTAAAAVVIPGSAAAADPGAASHIPTAFTSLAGAQVWLATGVFTVPAGPTQSERHFLTPNFVAAWSRETLVDPFFGAIFKGAAATVGGAVDCRGR

SEQ ID NO: 509 - protein, 665 aa, synthetic construct
GPPSGLPPDRGIELVLETGSRPMPRTRPLKRLSEGELAELRRQLRDLLDRGWIQHSTAGHAAAVVFARKPDGSWRICYDYRGLNAITEPQVEPLPHIDSLLDETRGAKWFTKFDLAQGYHQVRLREADWWKTSFRSQLGQFEWKVMPFGLQGSSSVLMRVMNAAMTRGLRTNAGGEDAGSRPGDTSVPGAVAWSDLPQGHRGVPGASGPLHRSVVVYMDDLLCYSSSLEQHLRDVREVLAILRQEKLYVKASKCAFGREELGFLGHRVSGAGVSVDPRKVAAVREWPAPPSNVELRQFVGLCNYYRRFVKGYADIAAPLTRLCGPHAPWHWGPVEQQSFDTLKCCLTTAPVLRTFDPGRRSVLTTDASETAISAVLTQPDDAGHHHPVAYESRKLTAAEQAYLPHVLELLAVVHALRVFRHYLLGSGAPRPQGVLSDFTLRTDNQAVSWLRTKRDINRFMARWLDEIEEFCFDIEHVPGRLNPADPLTRRSFPGAAGTGGGPTAVVDPNLTTAVAAVFIPDSTAAPGQGQGLAAAAGPTPTTAAAAVVTPGSAGTAGLREGHDVANGPNPTTAAAAVVIPGSAAAADPGAASHIPTAFTSLAGAQVWLATGVFTVPAGPTQSERHFLTPNFVAAWSRETLVDPFFGAIFKGAAATVGGAVDCRGR

SEQ ID NO: 510 - protein, 456 aa, synthetic construct
DYNEMSGLSWEMVELKLPIRPDKKPVKQIPRRFAPQILSKIKEEIERLLKSKFIKTARYVDWLENIVLVKKKNGTIRVCIDFRDLNLATPKDEYPMPVAEMLVDSAAGFEYLSMLDGYSGYNQIFIAEDDVSKTAFRCPGTLGCYEWLVMPFGLKNAGATYQRVMNSMFHDFIEKFMQVYIDDIVVKSSSEDDHLNHLRQSFKRMRQYGLKMNPLKCAFGVFAGDILGFVVHKKGIEINQNKTKEIMETKAPSTKKKLQSLLGKINFLGRFISNLSGRAQAFSPLLRLKKEDIFKWEPEHQKAFEEIKSYLVNPPVLSPLLKDKRMKLYIAASECTLGSMLAQEDENGVERAIYYLSRVVNDAETRYHPSEKLRLCLYFSCTKLKNYIKHFDVYVYSHFDIIKHMLSKPNLHSRVGKWALALTEYDQSLKSVKGNIVADFIADHSVIEPSLNGAND

SEQ ID NO: 511 - protein, 491 aa, synthetic construct
TIFLEMKGIVKDLGEMKIPLKPDTNSMKQYPYRLTPLYKEKENMELDRMLEAVIIERVEESEWISMIVVQDKKTTSEVHICIDLRKLNNTCLHDSFPTLFTDEVLESVGGQEVYSFIDGLYGYHQVQIAKEYRHKTTFVTEWGCFQYTLIPFGLKNSLVIFSRLVVAAFKYFIRNFLEVYFDDWTVFGLIKYHIGSLRMMLEWCRQYQILLNLKKCIVCALFGILLGHVVRHDGIMVNLAKITTIVDLPPPTTVKQLRTTIKQLRRTLGHTRYYQKFIKGYAEVNNPMEKLLKKCVKFQWSEDFQESLYTLKKKIVTTPILVFSDKKEFIYTSMHCLLHSTLYLRNLENGQLIILFPLLARNYKKKRINTLKLKEKDFPWCMHFRNFDTICLLGGHFKMFIDHSTLKNLVNNPMLGGNIFRWLLLFQDFDFEVIVKLGRLNLGPNHLSRLESGEEIVNINDNLPDAQLFSIMMFDNCYKEIIHLLSVIYPP

SEQ ID NO: 512 - protein, 515 aa, synthetic construct
SLADLKGISPAFCTHRIPMEEDHKPVVDNQRRMSNEMRSVVKKEVIKLLNAGIIYPVPTSEWVSPVHCVPKKGGLTVVKNDKNELIPQRTVTGWRMCIDYRKLNKATKKDHFPLPFIDEMLERLAKNTHFCYLDGYSGFFQIPIHPDDQHKTTFTCPYGTFAYRRMPFGLCNAPASFQRCMMAIFSDFIEDIMEVFMDDFSVHGTSFDHCLRNLEKVLKRCEEVDLVLNWEKCHFMVTRGLVLGHIISEKGIEVDKAKIETVEKLPPPTNIKSLRSFLGHAGFYRRFIKDFSKIAKPLTYLLQKDIPFEFTEECEVAFRKIKELLISAPIIQPPDWNLPFEIMCDASDYAVGAVLGQRKNGKVHVIYYASKTLNEAQVNYATTEKEVLAVVFAFEKFRSYIVNSKVIVYTDHAAIKYLLTKKDAKPRLIRWILMLQEFDVEIRDKKGVENVVADHLSRMDHGKDGSPIEDALRDDTLYAVLDKDSWMRDVIRAIRGEPLPHLNYNSKRRVLAEAK

SEQ ID NO: 513 - protein, 520 aa, synthetic construct
TLADIPGISPTVCTHRILLEEDAKPKRQPQRRLNPLILDVVKKEVTKLLSAGIIYPISDSEWVSPVQVVPKKSGITVIKNDKDELIPTRVQNSWRVCIDYRKLNEATRKDHFPLPFIDQMLERLSGKSHYCFLDGFSGYFQVPIAPEDQDKTTFTCPFGTFAYRRMPFGLCNAPGTFQRCMMAIFSDFLENSMEVFMDDFTVYGSSFEECLKSLTKVLKRCIEKNLILNYEKCHFMVNRGIVLGHLISEKGIEVDKAKIEVISSLPYPTNQREVRSFLGHAGFYRRFIKDFSKIARPLSALLQKDIDFVFDDNCRNAFNELKAKLVSPPILVAPDWELPFEISCDASNSSVGAMLGQRKDKVSRVIAYASSTLNAAQINYTTTEKELYAVVYALEKFRSYLLNSKVIVFTDHAAIRYLFQKPHSKPRLLRWSLLLQEFNLQIKDRVGAENHVADHLSRLPLTSQGVDISNLEIDSFPDALFCAMVSKEPWYSHIVNYLIAGVIPPVMSYSQAQKLKSEAK

SEQ ID NO: 514 - protein, 517 aa, synthetic construct
TLADIPGISPSMCTHRIILEDDAKPSREPQRRLNPPMMEVVKKEVIKLLDAGIIYPIADSKWVSPIHVVPKKSGLTVVENEEGDQVPTRIQNGWRVCIDYRRLNKATKKDHFPLPFIDQMLERLAGNPFYCFLDGFSGYFQIPIAPEDQEKTTFTCPFGTFAYRRMPFGLCNAPGTFQRCMLSIFSDYISKFIEVFMDDFSVFGDSFDSCLDHLSQILEKCIESNLVLNFEKCHFMVSKGIVLGHLISENGMEVDKAKIDVIKTLPYPKTVKDVRSFLGHAGFYRRFIKDFSKLAQSMCQLLKKDEKFEFGDKCKRSFDDLKEKLCSAPIIKVPNWELPFEIMCDASDTSVGAVLGQREGKDPHVIAYASRSLDNAQRNYTTTEKELLAIVFALEKFRSYLLGTKVIVFSDHGALRHLMKKKECKPRLLRWILLLQEFDLEIKDKKGCENLVADHLSRLPLKIEDLVPIREEFPEEHVLAAQVESPWYADLANYIVTKKFPPNFSKAQRDKMKSNAR

SEQ ID NO: 515 - protein, 521 aa, synthetic construct
SIADIKGIRPTLCMHRILLEDNVMPKRDTQRRLNPNMRRWVMKLLDVGIIYPISDSKWVSPVQVVPKKSGTTVVKNEANELVPTRMTTGWRVCIDYRKLNTSTSKDHFPLPFIDQMLERLASHSHYCFLDGYSGYNQIAIAPEDQEKTTFTCPFGTFAYRRMPFGLCNAPATFQRCMMSIFSDMVERFIEVFMDDFSIFGDSFDQCLHNLSKVLARCEQSNLVLNWEKCHFMVNQGIVLGHVISSKGIEVDKAKIDLIASMPSPTSVKEVRSFLGHAGFYRRFIKDFSKIARPLCNLLAKDVDFVFDRDCENAFNALKKMLTAAPIIMPPDWSLPFELMCDASDYAVGAVLGQRVHKKPHAIYYASRTLNDAQLNYSTTEKELLAVIFALEKFRSYLITNKVIVYTDHAALKYLIAKKDAKPRLIRWILLLQEFDLEIKDKKGSENVVADHLSRLVHVSNEEEDSLPLRESFPDEQLFSICALNSLNPLPWFADIVNYLCTNELPTGLSTFQRDKLRKQAR

SEQ ID NO: 516 - protein, 517 aa, synthetic construct
TLKDIKGINPLICTHRIHLEDNARTSQQPQRRLNPHMKEVVKAEVLKLLDVGIIYPISDSKWVSPTQVVPKKSGITVVKNEKGELIPTRVPSSWRMCIDYRKLNTATRKDHFPLPFLDQILERVAGHPYYCFLDGYSGYYQIPIALEDQEKTTFTCPFGTFAFRRMPFGLCNAPATFQRCMLSIFSDMVEHYLEVFMDDLTVFGNSFDNCLDNLENVLKRCEEKGLVLNWEKCHYMVASGIVLGHVVSSKGIEVDKAKVEIISHLPPPKTVREVRSFLGHAGFYRRFIKNFSTISRPLCNLLLKDASFDWNQDCQKSFEKIIGHLTSAPIMQSPDWSLPFELMCDASDFAVGAVLGQRKEGKPYVIYYASRTLNSAQMNYTTTEKELLAVIFALDKFRSYLIGSSTIVFTDHAAVRYLMSKQDAKPRLIRWILLLQEFNITIKDKKGVENVVADHLSRLTTESSFDITPINDSFPDDFLFSVTTIPWFANIVNFLVTGEMPSQWTPQDKRKFLTEVR

SEQ ID NO: 517 - protein, 516 aa, synthetic construct
SMSDIKGISPTIVQHRIHLLEESKPKREFQRRLNPVMKEAVKKDILKCLDNGIIYPISDSTWVSLVQVVPKKSGITVIKNQENDLVPTRIQTGWRVCIDYRKLNAATRKDHFPLPFIDQMLERLAGHDYYCFLDGYSGYNQIPIAPEDQDKTTFTCPFGTFAYRRMPFGLCNPPATFQRCMLSIFSDMAEKNLEVFMDDFSIFGDSFEQCLHHLNLVLKRCKEKDLTLNWEKCHFMVRQGIVLGHIISKNGIEVDKAKIILISSLPHPKNVKDIRSFLGHAGFYRRFIKDFSKIARPLTKLLSKDNPFNFSSECITAFELLKKQLISAPIMHAPDWSKPFELMCDASDFAVGAVLAQHIDNKPHVIYYSSRTLNDAQLNYSTTEKEFLAVVFALEKFRQYLIGSEITIFTDHSALKYLLLKKDAKARLIRWILLLQEFDLKIKDKKGADNVVADHMSRLQNIPNSEVPINDFFPDEQLFTILKEPWFADIVNYLVTRKIPAEWSKQDRYRFYSEMK

SEQ ID NO: 518 - protein, 647 aa, synthetic construct
PLRVEDETKINPEVWYTPDTVGKLNVEPFMVTIRDPEVPVRIKQYPIPLEGRQGLKPEIQRLIKQGLLEPCMSPFNTPILPVKKADGGYRLVHDLREINKRTVTRFPVVANPHTLLSQLGPNDRWYSVIDLKDAFWACPLKEECRNYFAFEWEDPDTHRKTQLRWTVLPQGFTESPNLFGQALEQILQDYQIGDTLTLVQYVDDLLIAGEDEERVREESIKLLNFLSLKGLKVSKSKLQFVEKEVKYLGHRLSQGTKKLDPERVKGILSLPSPKTKKQVRQLLGLFGYCKQWIEGYSGKVKFLYTKITKNGLLKWTQEDDQRLKELKTELVNAPVLSLPDLKRPFFLFVNTEEGTAFGVLAQEWAGKKKPVAYISKLLDPVSRGWPTCLQVVVAAALLVEEAHKITFGSELRVLSPHNIRGVLQQKAEKWITDARLVKYEAILITSPHLTLETTSLQNPAQFLYGEPSQDLFHDCLRNIEEQTKIRPDLEEEELGKGEKLFVDGSSRVVEGKRKSGYAIIDGKTFKVIESGPLSPSWSAQACELYAVLKALQLLNGKVGTIYTDSRYAFGIVHTFGKIWEERGLINSRGKSLVHQELISQILQAIRGPSEIAVVHVKGHQRGLNPLVRGNNLADQEAKRAALSALDL

SEQ ID NO: 519 - protein, 649 aa, synthetic construct
ALTEVDEQEIADKVWAEKGGASRMQISPIQVQVKPGVTGLCTPQYPMSRKGREGLKPVIERLLEQGMLEPTMSPFNSPILAVAKKDGKYRLVQDLRNINKVIVPRFPTVPDPYTILGMIPTEHRWFTVIDLKDAFWSCPLDEDSRPLFAFEWTDPETGKKGQLRWTVLPQGYTESPLLFGQALSEKLQEFDKGPGITLVQYVDDLLLSGKKREEVRQGSIRLLNWLSNQGLKVSKEKLQFVEQKVKYLGHYLQHGTRSLDPERIRGIMELQPPRNKTEVRKALGMIGYCRLWLDQYAVLAKFLHQKLEGPGDQVEWVETDSQKWETLKEALTSAPVLALPNSKLPFHLYVSVAQGVAIGVLAQKRGGKYQPVAYLSKELEPVVKGWPVCVQAVAAAAVLVIGSKKLTFGGALIVHSPHQVNPVLSQLATTWMTEGRLLKYETILRTSPDVVIGTDRNLNPAEFLSGERKEWEPEDHDCLSLVEMLTKVREDLEETPLEEGEKWFIDGSSRVEEGKRKSGYAIVDGVGEVIEKGALSPTWSAQKCELYALARALELAEGIRATIWTDSKFAWGVVHTFGKIWQERGYIKANGKEVEHVQLVDRTLEALKLPDKVAIVHVAAHQKGDTPEIVGNRWADKWAKEAAGELTLA

SEQ ID NO: 520 - protein, 653 aa, synthetic construct
PLTMDDQNQINPDVWYSPDTISKLEIPPIKIQISEPHIPVRVKQYPISLEGRRGLKPEIDRLLTQGILEPCMSPFNTPILPVRKPNGKYRLVHDLREINKRTITRFPVVANPYTLLSKLGPHNSWYSVADLKDAFWACPLAEECRDYFAFEWEDIETGRRQQLRWTVLPQGFTESPNLFGQALEELLKEYQVQTGNVLLQYVDDLLIAGNNKEDVRKESIRLLNFLAQKGLRVSQEKLQFVEEKVKYLGHYLFNGKKILDPERIKGILELPMPVTKRQIRQALGLFGYCRQWIENYSFKVKFLYEQLSKDKILKWTPRDQEQFANLKRELSQAPVLSLPDLKRPFHLFVNIHEGTAFGVLTQEWAGQKKPVAYLSKLLDPVSRGWPSCLQIIVAAALLLEETNRITFNGEVVLYAPHNIRGVLQQKAEKWLTDNRLLKYEGILIESPKFSLKTIGAVNPAEFLYPGEGNELLHNCFQTIEQQTRIRPDLEEEELQCGEVLFIDGSSRIVEGKRLSGYAIVKLEKGEFKTIESGPLSASWSAQACELYALWKALVSLKGKDGTIYTDSRYTFGVVHTFGKIWEERGFINSQGKELIHPELIRRVLGALKVPNKIAVVHIKGHQRGTNYQVRGNNAADIEAKRVAGNYNTILTIQ

SEQ ID NO: 521 - protein, 648 aa, synthetic construct
PLRVEDEKEVNPEVWYTPETIGKLQIPPFSVTIINPEVPIRIKQYPIPPEGKWGLKPEIERLLEKGLLEPCMSPFNTPILPVKKSDGSYRLVHDLREINKRTVTRFPIVANPYTLLSRIGPENHWYSVIDLKDAFWACPLSEESRNYFAFEWEDPETHRRQQLRWTVLPQGFTESPNLFGQALEKILQEYVVNENTILIQYVDDLLIAGKEEAIVRQESIKLLNFLALKGLKVSRSKLQFVEEEVKYLGHYLSKGEKRIDPERVKGILSIPPPTNKKQIRQLLGLVGYCRQWIENYSSKVKFLYNKLSQDNLLKWTMEDEQHLEQLRKDLITAPVLSLPDLKRPFSLFVNTDEGTAYGVLTQDWAGKKKPVGYLSKLLDPVSKGWPTCLQAVVAAALLVEEANKITFNGELRVLSPHNIRGILQQKAEKWVTDSRLLKYEGILIDSPKLSLEVTTLQNPAQFLYGEPWDSQLIHDCFITIESQTKIRPDLEEEELGEGEKLFVDGSSRVVNGKRKSGYAIIKGPNLKVLESGPLNHSWSAQACELYAVLRALEYLRNKVGTIFTDSKYAYGVVHTFGKIWEERGLINSQGKDITHQELIVQILKALRSPKGIAVVHLKGHQKGVDIRNRGNNVADREAKRAALKDWTP

SEQ ID NO: 522 - protein, 656 aa, synthetic construct
VLREEDEKKINPIVWAKPGNPGLMNVTPAKIHLKTDTPVYRPQYPIRPEAEEGLKPVVRELLDDGLIEPSDSPYCTPILPVKKPNGTWRMVQDLREVNKVVIPRAPIVPDPHTILRRIPDTHVWYTVIDLKSAFFSVPVDPESRPIFAFQWPHPETGKLTRFQWKILCQGYCESPTIFGEILEELLQGWSPPEGTLLTQYVDDLLISGEEGKQVRKASISLLNFLGEKGLRVSLDKLQFCEPEVKYLGLILKKGTKCINPKRLEGIQNLEMPKTKRQLRSFIGTINFCRQWIEGFSELIQPFLKKLLKEEPETLVLEKADYKLFERVKKVLVSAPALGLPNPNKPTHLFVTTGNGVAKGVLAQKKAGQYQPIGYLSKHLDAVVLGWPTCLQACAAAAELVKLTRKLYPFEAIVLHSSHQLKTILTHTARRWMTDSRLLQIEAILLEKPDLLLTTTDHYGPAGGLSEAVRKEMCNEHDCIAITDLQTKFREDLQEEPIEGAWNLYTDGSSRVVNGKRITGYAIVEDGGLEVETGPLPPSMSAQTAELYALKRALEIGKEKNVNIWTDSKYACGVVHVFGKIWSERGLLTSQGKNLAHHRLVLDTLEALSFPSRVAIIHIPGHQKGNAPEIVGNRLADELARRAAEREFDTARLAALI

SEQ ID NO: 523 - protein, 645 aa, synthetic construct
EGADEILNKIPEGVWSTGPYDVGFCKKYKPIELTVSDTQVVYRKQYQWPAEADSGMEETLRGLWQAGVLEESHSLWSTPLRPVKKADGVSYRMAHDLRAINDAIMTPVLPVPDPHRILTSLSPNLKWFTVIDLANAFFCLPLHPNTRKYFSFTYKHTRLQYNRLPQGCKNSPGLFNQALKDMLSDLQLPNNCVLVQYVDDLLLACETPEVCLEATKRLLLKLHSCGFKVSRKKLQCCRKAVNFLGRVVSAHGSTMSTAHRNAILHHPKPETVKDMLSFLGLCGYSRNYISCFVERIAPLRALIREKGNKNTTAQLNWTEEATNCFISLVGALASAAALAVPNYDLPFHLNVSLSASVVNGVLFQKRDGGRCVMMYCSTTLDPMEQKQPQCTRYAAGLATLITKTAHIVKGYPLNILTEHSVSAYVASASFTMSSLRQTRLMKILQAPNIQYVHTGINMADCIGATGTPHTCVFQVQQDLKLRPDLQTSPLGRGHLAFTDGCCYRQTDGSLRAAAAVVRYDSGSDVFTTVATVQLPDSPSAQAAEVLALCLALEAYVDQEVTVYSDSAYAVSAAVLDLAAWKRTGFVTAKGVPIAHRSLMERLAVSIMLPRAVAIVKTAGHSKANTMTARGNDAADRAAKKAAGYQ

SEQ ID NO: 524 - protein, 649 aa, synthetic construct
TPEEKETLLADVPASVWAKDSYDIGTLTTAPPLIIKAKPLSRYPAKAQYPLSKEAEEGIEPTFNALLERGAIVPCPYSPCNTPILPIKKPDNTWRFVQDLRLVNEAVEPRHPIVPNPCTILSTIPSNAKCFTVIDIKNAYFSIRVDPASQFWFAFTYKGQRFQWARLAQGYVESPSYFCECLTECLSKFTPPGGSTIISYVDDILLSSPSKKVCKMDTVALLTYLAIVGLKVSKQKLQLCQERVKYLGHILTPGSRALDASRISAITACPRPKTKQQLLRFLGMTGYCRAWILHYAERAQPLQSCANACKNLTDNLTWTDDCDKAFVDLKVALASTPALGLPNYDLPFHLFVCEKAGFMSGVLCQQHGGQYRPVAYLSKHLDPVARGMIPCLKAVAAAASGVLSCADLVLLHPLTVHVPHEVHSLLMQAKTSHLTPARLLSYQHVLLTLSHVTLARCTSLNPATLLPTPDDGDTHDCCEVVSICTKPRPDISEIPLTNPDLVFFVDGSSMRLGSGEVGSSYAVVNHFEVVEAYSIPGTYSAQAAELVALLRACILAKGKSVCIYTDSRYCWGIVHDHGAIWKERGFLTAAGKPIQHKDLIASLLEAIQFPASVAVIKCTAHSNHKDEVSSGNNRADAAAKAAAKGGQRI

SEQ ID NO: 525 - protein, 652 aa, synthetic construct
NHVRADEMLATIPESLWTSHPHDVGRIEGEVVLTLKPTVTKPIWRAQYKLKPEQVEGIAETVTGLLRAGVLREAEGARWNTPILPVPKAGNKGWRMVHDLRLINEATTTLALPVPDPYVALRAITPEQKFFSVCDLGNAFFCLPLAEECQEWFSFTYGNKQYTYTRLAQGYKDSPGLFNQALNQILENMILPEGATIIQYVDDLLVATKTAEDSLAATKTLLMTLADAGFKVKREKCQITRRSVEFLGRIVGEHGTAMSDMHQDAILQYGKPKTVQDMLGFLGLCGYSRTYVPEYVTLTQPLREMVTEVGHRALKDDLNWTVDRDKAFQKVKSALSAAAHLASPNYEKDFYLDVAETEGIVNAVLYQRERGERKILSYFSCKLDSVEVGKPPCIRFLAALAKAIEKTAHIVLCHPLIVNTDHSVTALLASSAFSFSATRQIKIDDTLKGPHIMFKAPKDNHANMAKGVNGGGLLQHDCIRRVEGDSKLRENLHATPLDDPDWELFTDGCSYKSDIGNRAGYAVVKWDNDKADIIQAGEIPQPASAQVAEIKALTEALKLSAGHKVNIYTDSAYGFGAVHYEGPAWVRRKFLTAAGTPVKHEHHLRELIEALNGPTEVAVIKVTGHSKKNDKESNGNAAADAAAKLACNYPVK

SEQ ID NO: 526 - protein, 650 aa, synthetic construct
NHPDSDDIINAMPASLWSTGPADVGKLQIPPIKINLKPDTVPIWKYQYPLSREKIDGIRPVIEDLLRSGVLRQTVSDWNTPILPTPKPGKNVYRMVHDLRPINQVVLPSHCKTPNPFVMLTSITPDHKFFTVIDLANAFFSVPLHEDCQNIFAFTYENSQFSYTVLPQGLKNSPSLFNNILKTHLSELTPHLPPNTVILQYVDDILIAAPSTAKNLQATSLVLHFLATKGYKVSKDKLQICRPTVHYLGRLITSGATSMSPEHKSSILNHPKPNTGKSLLSFLGLTGYSKQFVPNYQDLVSPLRALIRQKGYANLNAPLHWTPEAEICFTALKQALAQATQLNPPDYSLPFHLDVSEQEGTVKAVLYQKQGGTRTVLMYYSSKLDNVEIGHPPCTRHCAAIAKALIKTAHIVMQHTVHVHTNHGVAAFLDSTAFTLSTKRQQKLKNILDQPNVLYTSEGVNMAAEISTQGEPHDCAVLAETDMKIVETLTPNPIENPDLVLFCDGSSRRRLDGTLSAAYAVVKLVPKSQLVTIEATHIGNNSAQKAEIMGLTAALNHAHGKTVNIYTDSAYAHHAVYVDLPHWSRKGFVTATGTPIKHLPEIIALQEALSRPKGVAVLKCKGHQSDNTIVAKGNAAADESARRLTEDDKI

SEQ ID NO: 527 - protein, 650 aa, synthetic construct
TPSIPNLHGVPSSLWATHKEDAGLVACAPYEASIKHTDPIYKKQYPLTEEKALGIDKVLHQLLLQGVVVPCKSPYNTPINPVKKPDGTWRLTQDLRAINDIIIPVSPIVPDVPNIMASIPSSHTHFSVVDLCSAFFSIPVEPQTQPLFAFTHRGRQYTWTRLPQGFVDSPAVFALTVRQCLTDVCLPPNSCFLQYADDILVTGQDEATCHQATIAVLQRLAETGFKVSPSKLQLCKTSVTYLGYLISQGSKALTPSRVSIILEGKKPATKQAMMAFLGLINYCRQWIPDCSYYDKCLRSAFTHSDPMSSLITWTEEMTQAYGALKKALCSAPALGLPNYDLPFHLYVTHHADTASAVLAQEHGGSFRPCAFLSKTLDTVAQGLPTCLKAMAAAALMVLDAEKLVLGHPLVLHCEHQIQYMLKHLSTQHLSVQRRCGYEQTLLATENLTIKPTSSMDTVAHALQRFLQVPADHFSEDHNCVDSVVSDCSLRPDLKSTPLQNVRNLYVDGSCSKPQDGVYLTGYAVCELPDTVLEAAAIPFSSAQAAELIALTRACVLAADQDVNIYTDSRYAFGVAHDFGAIWASRGFVAADGKPISHSSLVMDLIKAARLPRSLAIIKTRGHSTFDTEEAKGNNFADTQAKLAAQSGKQP

SEQ ID NO: 528 - protein, 660 aa, synthetic construct
STQMESDSKREEMLQKVPECLWSQHSTDIGLVKSAQPVKVELRPGTSPPWKNQYPLKEEAIRGIEPQIEGLLKADVLKITQNPQSNTPLLPLKKPDGSYRLVHDLRAVNEVVADFPAEVPDPHTLLAQIPPDATHFTVLDLCGAFFSVPLSIESQGFFGFTYNGQFYESKRLPQGFKHSPHIFNKVLREDLAGIDQILKSTVVQYVDDIIICSPDEETCHKDSIKLLQILAEKGHKASQKKLQYCREKVIYLGQTITKGHRSISDSHLEAIRKAPKPRTVREMLTFLGIAGYSSSWVEDYASLTGPLRAMIKDTGNAQLHCNLSWTQDGLLAFETIKQRLQEAPALALPDYSKNFLLYVSTSTGGRYACAVLCQPTGTGTTPQPISYYSTAFSEVELGLPLCYRALVGVSLMYDKASSVTMGYPVTILTHHSVRNLLNYGKYTLTMSRLRDYHRLLEQEDVTLVRCVTVNPAESLPTSEDGEPHDCIQESEKYSKLRSDLQALPLSEADVEYWTDGSCYRVGDKLSAGYAVVKAQGTEFVVEKAGIVPQPASAQLAELVGLTEACLLAEGKRVTIYTDSAYAHNVCHLFGAVWKNRGFKKTDGSPIQHHAQIMKLLHAMMKPKEIAIAKCAAHKMDVSKVTQGNKAADEAAKAVTGADKL

SEQ ID NO: 529 - protein, 651 aa, synthetic construct
SLTPFEREALLASVPESAWAKDSYDFGTLTTAPPLVIHAKPGSHFPAKAQYPLSKEAEKGIEATFKALLERGAIVPCPSSPCNTPILPIKKPDNTWRFVQDLRLVNEAVQPRHPIVPNPCTILSSLPPDVKCFTVIDVKNAYFSIRVDPSCQFWFAFTFKGQRFTWVRLPQGYVESPSYFNESLVFCLSKFTPPGGSTIISYVDDILVASPSKEMCKMDTVALLTYLAIVGLKVSKQKLQLCQERVKYLGHILTPGCRALDASRISAITACPRPRTKQQLLRFLGMTGYCRAWILDYAERAQPLQTCANACKHLTDHITWTDDCDKAFVDLKLALASAPALGMPNYDLPFHLFVCEKAGYMSGVLCQQHGGQYRPVAYLSKQLDPVARGMIPCMKAVAAAASGVLSCADIVLLHPVTVHVPHEVHSLLLQAKTSHLTPARLLSYQHVLLTLSHVTLARCTTLNPATLLPTANDGDTHDCCEVVTMCTKPRPDISETPFSNPDLIFFVDGSSMRLGSGEVGSGYAVVNQFEVVESYSLPGTFSAQAAELIALFRACILAQGKSACIYTDSRYCWGIVHDHGAIWRERGFLTATGKPIQHKDLIASLLEAIKFPTSLAVIKCAAHNNTSDEVSLGNNRVDAAAKAAAKGGVRI

SEQ ID NO: 530 - protein, 651 aa, synthetic construct
PLSEEHNVLLACIPHDLWSQHKTDVGLVRSAQPVHIKVKTGIMLPYKRQYPLKPHQTEGIGPTIKGLVAAGVLKTTKSPCNTPIFPIKKINSGDYRLVHDLRAINSIVDAETPVVPDPHTLLSNIPHDACWYTVIDLCSAFFSVPLHPDSQYLFAFTYKGQQYTYTRLPQGYVESPSVFNRVLANDLQHLDVTSTVLQYVDDLLVCSNTQEQCTQDSLTVLKALEKGGHKVSKDKLQFCQPQVEYLGRQLCGNKRAIAPSQIEAVSKAPKPLTVSHMLSFLGMTGFSRPWICDYAIKTAPLRGLIRAAGQNNGSAVLHWTTEAEGAFQALKQDLQTAPALGNPNYANMFHLYVAEKSGYACAVLMQDTPTGKQPLAYYSTKLDNIEMGLPPCYQGLAAAAFAFQKASAITMGHPTTLYTSHQLHALITSPRFVLTQARKTGYEVILAAPELNIQRCATINPATRMVIPLEGTPHDCIRSTDEFLRPRQDLHNQPIPAELTLFVDGSCFRDNTGNHAGYAIVQLHPDDTFTEVQTIKLAQPCSAQLAEIKALTAACQLAAGKTLNVYTDSQYAYAVCHIHGVIWKQRGFLRADGSPVTHGEAISALLDAIHHPKALAIIKCAAHQKIDSLIAKGNNLADEAAKRAATSTCIG

SEQ ID NO: 531 - protein, 650 aa, synthetic construct
CLSLEEQETLFASVPDSIWAKDDYDFGTLSTAPPLVVHARTIYYPSRAQYPLSKEAEQGIEPVFTSLLNRGAIVPCPSSPVNTPILPIKKPDGTYRFVQDLRIVNDAIHSRHPIVPNPCTILSSLPATATWFTVIDIKNAYFSIKVDPASQFWFSFTFKNERFTWARLPMGYSESPSVYNEAMVACLRNFTSPAGSTVISYVDDILIGSPSKEACKIDTVALLTYLASVGLKVSKHKLQLCQEKVKYLGHILSPGNRALDATRITAITACPRPRTKQQVLRFLGMTGYCRAWILNYSEIAQPLQLCATACKNLTDVVTWTDDCETAFRKLKQALASAPALGLPNYDLDFHLFVCEKGGYMSGVLCQLHGGKHRPVAYLSKRLDPVARGWVPCLKSVAAASSAVLACADLVLLHPLTVHVPHDVHALLMQAKTTHLTTARLLSYQHVLLALSHVKLVRCSLLNPSTLLPTEEDGESHDCCDVITICTKPRPDISEEPLSNPDLLFYVDGSCLRLDSGEVGSGYAVVNHIRVVESYSLHSSFSAQSAELVALIRACILASGKSVCIYTDSQYSWAVVHDHGAIWKERGFLTAAGKPIQHKDLIELLLKAIQLPTAVAVVKCAAHTKNNDEVSLGNARADAAAKSAAKGGVRN

SEQ ID NO: 532 - protein, 653 aa, synthetic construct
FNSDLGTDILTQVPDQLWSRHETDVGLAVSASPVVVKLKPGAVLPWRPQYKLNPADEEGIANLIDGFSKAGVLVEISSPCNTPILAVLKADKSKYRLVHDLRAINAILEEVAADFANPHTLLNAIPTKAKFFTVIDLCSAFFSIPLAEESRYLFSFTFRGRQYSYARMPQGLTSSPAWFDRVVSQDLQELDLSGVIIRYVDDVLVCSDTIEDCQRDSIKVLQRLAECGHKASRTKLQFCQPQVEFLGRVISHGTIALSPDHLKGISRAPRPQTCAQLTTFLGMTGFSAEWLEDYAVKTAPLRDLLKSSEDKTLKKSLEWTTEALMAFDVLKQELQSAPALKMPDYDKTFHLYVSNRCNMYAAAVLTQDSCSGGRKQPIAYYSARLDDVARGWPPCYQGLAAVHMAYEKASAITKSYPVVIYTHHKITELINHSKLVLTTARCLQYLPLLTYPDVTIKRCETTNPANMLPFEFEGETHECVAETTRYTKLRPDLESEPLDDAQVIYFVDGSCFRDHMGTHAGYAVVQHKEGTFVTVKAEKCLQPCSAQLAELYGLTAACELAKNLSANIYTDSAYAHGVCHLFGAVWKLRGFQKSDGKPVRHGKQIMKLISAMMLPHRLAIIKCPAHQKDNSSTTMGNNAADEAAKCASGCKVA

SEQ ID NO: 533 - protein, 645 aa, synthetic construct
AALPELTDVDPRLWAEHKDDAGFIDVPPYVANLLKDTPVYCKQYPLSKEKEDGIRPVIKQLLAQGILIHTHSPYNTPINPIKKANGSWRLTQDLTKINELIKPLAPIVPDVHTILNSIPASHAYFTVIDICSAFFSVPVDPVTQPLFAFTFDHAQLTWTRLPQGFSDSPAVFSALVHATLMDAKLPPDTCLLQYADDILVTGASEDLCTAASTIVCNILAEAGFKASKDKIQWVKRKVEYLGHELSQGTVRLSADRIKAIATYKHPSTKKQMQSFLGLVNYCRSWVPNCSMYDKILRAATLQDSDEITWTAEMDQAFTYLKTSLIRPPALGLPVYSQEFHLYVHEDGGTAAAILAQEHGGNFRPVAYLSKTLDSVAKGLPACLRAVAAAAIMVQDAERIVLSHPLVVHTNHQVGVIMRNISTQHMTAQRRSGYEAILLATANLTLKPTSVVHSPTLCLHKLLTQGDFEDDDHDCLARIQISTACRPDVSTSVLEEGNHWYVDGSCFKPNDNEYLCGYSIVELPDRIIEAYSLPYKSAQVAELIALTRACQLAKGQCINIYTDSKYAHGIVHDFAKLWEERDFKTSEGKPISHHSVVAELIHAAQLPSKLSVIKVAGHVAGESEEAKGNRLADEVAKWAAKDVILS

SEQ ID NO: 534 - protein, 651 aa, synthetic construct
NTDHPALSHILAGLPDTLWSQGSADVGLVHCPPIYIPLKPGYQPIWKYQYPLNKEKIEGISGTIKGLLEAGVLRETESLWNTPILPTPKPGKRDYRLVHDLRPINQATATTTWSTPNPYTMLAALSPTHNWFSCVDISNAFFSCPLHPDSQDMFAFTYEGQQYTYTRLPQGFTESPALFNKILRDQLQSLPIPQDVVLLQFVDDICLAAESEASIIHATKILLERLFDLGYKLSKEKLQLGRRRVTFLGRVVAAGCTSITPSHRTDILSHPKPTTVKGMMAFLGLTGYSRQYIPDYAALTAPLRLLITTAGHANLKAPLVWTTDADQAFITVKQLLSAATVLAPPDYTQPFHLDVSEKEGFVNAALFQKGGGGERHVLMYYSSKLDNIEIGHPVCTKHVAAIAKALEKTSHLTMCHQTIVHTIHGVAAFLNSSAFSLSHRRTDRIKDLVLQSHITFTGEGVNMAENMSIGEAHNCVKDTETQMRVTPTLSSVPLSNPDLVLYCDGCCYRKNSGELIASLAVVSGKIGNNLTTVKAEIVPQPASAQKAEIAALTEACRYAEGKTVNIYTDSAYAHQAIHVDIPHWLRKGFVTSTGMLIKHLKEMTDLVEAVQLPTKVAILKCKGHQKSNTEIAKGNEAADHAAKTTAGYYDQ

SEQ ID NO: 535 - protein, 638 aa, synthetic construct
DNIKQLSVLPGLSEDPSAVGLLQVKEQQVPIATKAVHRRQYRTNRDSLLPIHKLIRQLESQGVISRTHSPFNSPIWPVRKASGEWRLTVDYRGLNEVTPPLSAAVPDMLELQYELESKAAKWYATIDIANAFFSIPLARECRPQFAFTWRGIQYTWNRLPQGWKHSPTICHGLIQTVLEQGSAPEHLQYIDDIVVWGDTAEDVFKKGEQIIQILLQAGFAIKRSKVKGPAQEIQFLGIKWQDGRRHIPADVIDKITAMSPPINKKETQSFLGVVGFWRMHVPNYSLIVSPLYQVTRKKNDFTWGPEQQQAFEQIKHEIARAVALGPVRTGQDVKNILYTAAGEKGPTWSLWQRTSGETRGRPLGFWSRAYRGSEECYTPTEKEILAAYEGVRAASEVVGTETQLLLAPRLPVLNWMFKGKIPSTHHATDATWSKWIALITQRARMGNFSRPGILEVIMDWPEGKKFETSPGEEVSRAKEAPPYNELPGNEKKYALFTDGSCRIVGKYRRWKAAVWSPVRQVAEATEGKGESSQFAEVKAVQLALDVAEREGWPVLYLYTDSWMVANALWGWLQQWEQNNWQRRGKPIWSAELWKDIAARIKNMVVKVRHVDAHMPKSRATEEQKNNHHVDQAAKIEVA

SEQ ID NO: 536 - protein, 614 aa, synthetic construct
RAVQAIIRGHAEIEPICLPQPRRITNTKQYRLPGGQQEITKTVQELERVGIIRPAHSPYNSPIWPVRKPDGTWRMTVDYRELNKVTPPIHAAVPNIASLMDTLSREIETYHCVLDLANAFFSIPIAKESQDQFAFTWEGRQWTFQVLPQGYVHSPTFCHNLVASDLANWNKPSTVKMFHYIDDLMLTSDSIEALEKTVPSLITYLQEKGWAINPQKVQGPGLSVKFLGVVWSGKTKVLPSAIIDKIQAFPVPTKPKQLQEFLGILGYWRSFIPHLAQLLKPLYRLTKKGQVWDWGRTEQEAFQQAKIAVKQAQALGIFDPTLPAELDVHVTQEGFGWGLWQRQGSVRIPIGFWSQIWHGAEERYSMVEKQLLATYSALQAVEPITQTAEVIVKTTLPIQGWVKDLTHIPKTGVAQSQTVARWVAYLSQRSRLSSSPLKEELQKILGPVTYHSETPEEIVVTCPEKSPVQEGKYPIPEDAWYTDGSSRGNPSRWRAVAYHPSTETIWFEEGDGQSSQWAELRAVWMVITQEPGNSALNICTDSWAVYRGLTLWIAQWATQDWTIHARPIWGKDMWVDIWNVVRHRTVRAYHVSGHQPLQSPGNDEADTLARVRWL

SEQ ID NO: 537 - protein, 654 aa, synthetic construct
PLRQEDEKKINPEVWYNPGSVGQLKIAPFTVKIKNPEIPVRIKQYPISPEGKRGLKPEIDRLLSRGLLEPCMSPYNTPILPVKKADGSYRLVHDLREINKRTIARFPVVANPYTLLSKLGPDNVWYSVIDLKDAFWACPLDESSRDYFAFEWEDPETGRRQQLRWTALPQGFTESPNLFGQALEQILKDYQTKSGVTLTQYVDDLLLAGKDEEDVRKESIRLLNFLGLKGLKVSKTKLQFVEEEVKYLGHYLKKGEKRIDPERIQAILSLPTPQNKRQIRQILGLTGYCRQWIENYSNKARFLYQKLTQEGLMKWTQRDTEKLQELKESLVHAPVLSLPDLKRPFFLFVNVAEGIAFGVLTQDWAGKKKPVAYLSKILDPVSRGWPTCLQILAGCAVLVEETRKITFNSSLKVLSPHNIRSVMQQKADKWISDARLLKYEGILLEAPDFALETTTLQNPAAFLYGEPEQEPLVHDCIATIEEQTKIRPDLEEEELDEGEKLFVDGSSKVIEGKRKSGYAIIGGTDLQVIESGALDKSWSAQACELYAILRALTLLKGKEGTIYTDSKYGFGVVHTFGKLWEERGLINSQGKDLVHQKLIIEVLRALRGPKKVAVVHLKGHQRGLDFRSRGNNAADQEAKRAAMREMVLREKQGN

SEQ ID NO: 538 - protein, 664 aa, synthetic construct
PLILYLSTPSTPTPDQLPFVNPQVWDTSEPVVASHHPPVKIKLKDGSKFPSRPQFPISLLHRLGLKPIIERLKRQGLLIPISSPCNSPILPVRKPSGAYRLVQDLRLINEAIVPLHPVVPNPYTLLSHIPPNTTHFTVLDLKDAFFTIPLHPDSYFLFAFTWEDPDTHTSGQLTWTVLPQGFRDSPHIFGQALAADLQQCLLKASTLLQYVDDLLLCSPALTISQDDTSSLLNFLGSKGYRVTPSKAQLCTPSVTYLGIHLTPTSKSLTGDRIRLLRELQPPQTADEILSFLGLAGFFRHWIPNFSILARPLYQAAKDTPQGPLSDPSSVRRLFSKLRDCLTAGPILTLPDPSKPFHLYTDERSGSATGLLAQPVGPTYRIIAYLSKQLDGTARGWQPCLRALAAAASLTKEALKLTLGQPLVVYSPHRLRDLLSHRSLAHLTPSRLQLFHLLFIENPQISLSTSPRLNPATLLPTPSPTSEPTHSCPQLLEDLTPPHPGLSDQPLSNPDRILFVDGSSFLAADGRRHAAYAVVTPETVVETVPLPIGTTSQKAELIALTRALHLSKGQRVTIYTDSKYAYLIAHTHSVLWQERGFLTTKGTPIVNGPLIAKLLEALSLPTEVAIVHCRGHQTSKDMVSIGNNKADSVARKTALSNPVSPILFL

SEQ ID NO: 539 - protein, 673 aa, synthetic construct
TCPISEEYLLLEKPEQKASPLIEKWKKTIPTVWAETNPPGLAIQQAPLVIQLTATATPIRVRQYPISQHAREGIAKHLNRLREAGILVPCHSPWNTPLLPVPKPGTLEYRPVQDLREVNKRVETIHPTVPNPYTLLSKLSPEHHLYSVLDLKDEFFALPIAKVSQPIFAFEWTDPGGTYNGQLTWTRLPQGFKNSPTLFNDALQRDLIPYRESHPDVTLLQYVDDLLLAADSFESCAKATEDLLRKLNALGYKVSAKKAQICLDSVTYLGYRLYEGKRSLGPERIQAILNIPKPTTKRQIREFLGSAGYCRLWIPGFAEMAKPLHTATRGEGAEMVWGEQEDRAFEQIKHALTQAPALALPDITKPFQLFAHEVRGIAKGVLTQTLGPWKRPVAYLSKRLDSIAAGWPGCLRAVAATAILVKEASKLTLGQDLQVIGPHAVASLLHSPPDRWISNARIIQYQVLLLDPPHITFLRTEALNPATLLPDDNSEAPLHNCLETVSNLTGLREDLRDQPLPKVDIELFTDGSSFIKNGIRYAGAAVVTQDQVIWAQALERNTSAQKAELIALAQALTWAKGKTVNIFTDSRYAFATAHVHGALYKERGLLTSEGKEIKNKREILALLKALWLPKKVAIVHCKSHQKTNSPQARGNAFADATAKATAEGEVLPIEILP

SEQ ID NO: 540 - protein, 673 aa, synthetic construct
TMPASEEYRLYEDTRQANDLGLLEIWKQEIPKFWAETNPPGLAKHVTPILVQLTSSATPARMRQYPMSREAQQGIRIHIQRLKKAGILVPCKSAWNTPLLPVRKPGTNDYRPVQDLREVNKRVETVHPTVPNPYTLLSLLPPERTWYSILDLKDAFFSIPLAPQSQPIFAFEWTDPEEGETGQLTWTRLPQGFKNSPTLFDEALSKDLSSFRGKHPGCSLLQYVDDLLIAASSQRDCEEATHDLLKVLGALGYRVSAKKAQLCAQEVTYLGYQIKEGQRALSQARIQTVLKIPTPSTKRQVREFLGAVGYCRLWIPGFTELAKPLYVATGGSDASLKWTEMEEKAFQALKTALVSAPALSLPDLNKPFQLFVAESVGVAKGVLTQTLGPWKKPVAYLSKRLDPVAAGWPGCLRTVAAAALLVKEATKLTFGQTLEIVTSHNLASLLYSPPDRWMTNARITHYQVLLLDPPRVTFKQTAALNPATLLPNPEDEATHDCGEILEALTSLRADLTDVPLPDALVTLYTDGSSFVKDGVRYVGAAVVTNQEVLWAASLPQGTSAQKAELIALTQALKWGAGKKINVYTDSRYAFATVHVHGALYQERGLLTAGGQAIKHAPEILALLAAIWEPEKVAVIHCKGQQRDDSDVAQGNRFADDIARKAAKRLVGTQAQLI

SEQ ID NO: 541 - protein, 672 aa, synthetic construct
TLTLEDEYRLHQQPQSPDKNIKDWVQRFPDAWAETGGIGLAKHRPALYIETKPGVNPVRVKQYPMTREARTGITPHIRRLLNQGILRPCRSAWNTPLLPIRKPNSNEYCPVQDLREVNKRVADIHPTVPNPYTLLSALPPYRQWYTVLDLKDAFFSLSLAPKSQELFAFEWTDIDMGINGQLTWTRLPQGFKNSPTLFDEALHEDLGEFRKNHPNLTLLQYVDDLLVAAENWDECIRGTENLLQTLGNLGYRASAKKAQICRPEVTYLGYLLKGGKRWLTQARKETVLRIPKPQSPRQVREFLGSAGFCRLWIPGFAELAKPLYEATKDKQPFNWTIEADKAFQQIKDALLSAPALGLPDVIKPFFLYIDESKGIAKGVLTQYLGPWRRPVAYLSKKLDPVAAGWPPCLRMIAATALMVKDADKLTMGQELHVITPHAIEGILRQPPDRWLSNARLTHYQSLLLNPPRIIFQAPSALNPATLLPDPDLDTPIHDCSEVLAQVHGLREDLQDHPLLDADAVQFTDGSSFLHQGQRYAGAAVVTETEVIWAEPLPIGTSAQKAELIAMTKALTMGEGKKLTVYTDSRYAFATAHIHGAIYRERGMLTAEGKSIKNKEEIVSLIDALWLPKKLAIVHCPGHQKPTDPVSRGNCLADKMAREIALQRDLIMVAQLP

SEQ ID NO: 542 - protein, 680 aa, synthetic construct
SLSLADEHRLFESQQEPGGDMTHWVKRFPTAWAETAGTGLAKHLPPVVIQLKASALPIRVKQYPMPEEARRGIAPHIHRLIKEGVLRPCQSAWNTPLLPVRKPGSGDYRSVQDLRKVNERTEDIHPTVPNPYTLLSHLPPSQVWYTTLDLKDAFFSIPLSEISQPLFAFEWQEDGGQSGQLTWTRLPQGFKNSPTLFNEALSQDLEPFRRSHPRVTLLQYVDDLLLAAETREECIKATEHLLTELGELGYRASAKKTHICKRSVTYLGYRIADGARWLTDAMKQTILAIPSPTSTRGVREFLGSAGFCRLWIPGFAEIARPLYEATKEAPDWSWGEREQQAFDQLKDALLQAPALALPDPTRPFTLFVDEKKGVAKGVLTQQLGPWKRPVAYFSKKLDAVAAGWPPCLRIIAAIAVLVREADKLTFGQALWVTAPHPVEGILKQPPGKWMTNARLTHYQGLLLDSPRITFTDPVILNPATLLPNPELQTPVHNCKEFLSEVTQVRADLKDTPLSGCKLNWYTDGSSFFQDGARRAGAAVVDQEGNTVWSSALPPGTSAQKAELIALAEALERAKGKRVNIYTDSRYAFGTIHVHGAIYRERGFRTAEGKHLKNLAEVQRLLMAVEKPKAVAVMYVPGHQSAKTPEAVGNNRADQEAKRVAMVSPPMETGQPSTVAAIDVP

SEQ ID NO: 543 - protein, 623 aa, synthetic construct
QRCISIRAIQTILRGHAKHEPICLPKPRRITNVKQYRLPGGQDEITKTVQELERVGIIRPAHSPYNSPIWPVRKPDGTWRMTVDYRELNKVTPPVHAAVPNIASLMDTLSREIKTYHCVLDLANAFFSIPISEESQDQFAFTWEGRQWTFQVLPQGYVHSPTFCHNLVARDLAKWEKPNNVNLYHYIDDLLLTSDSLEAVRQAADLLIAYLQKRGWAINPQKVQGPGLSVKFLGVIWSGKTKVLPSAVVDKVQAFPVPTTSKQLQECLGILGYWRSFIPHLAQLLRPLYKLTKKGQSWNWGKIEQDAFQQAKLAVKQAQALGIFDPTLPAELDVHVTQDGFGWGLWQRQSSVRTPIGFWSQVWHGAEERYSMIEKQLLAAYSALQAVEPITQTAEVIVKTSLPIQGWVRDLTHLPKTGVAQAQTVARWVAYLSQRSSLSSSPLKEELQKILGPVTYHSDTSKEPMVAPPEKSPVQEGRYPIPEDAWYTDGSSRGNPSKWRAIAYHPSTETIWFDEGDGQSSQWAELRAVWMVITKEPGDGVLNICTDSWAVYRGLTLWITQWATQEWTIHARPIWGKDMWVDIWNTVKHRTVCVYHVSGHQPLQSPGNDEADTLARIRWIENS

SEQ ID NO: 544 - protein, 575 aa, synthetic construct
NSKPLEVPTALPLKWLTEKPIWIKQWPLAEDKLQALEQLVQEQRDANHIEESTSPWNSPVFVVKKKSGKWRMVTDLRAVNKVIQPMGPLQSGLPLPSLLPKRWPLIIMDLKECFFTIPLQEKDREKFAFTVPTYNNSQPSRSYQWTVLPQGMLNSPILCQYFVNKSLEIIRKQFPKSIIYHYMDDILLSDSNKDTLESMFEEVKKVLPRWGLQIAPEKIQREDSINYLGYRIGLEKIRTQKAQIRRDRLRTLNDFQRLLGDISSLRPAVGITPDLIVHLNKTLDGDKDLNSPRKLTVEAEKELTMIEEKLQEAHVDRVNPNLSSILVILPSRISPTGILMQREDIILEWIFIPHKPSKKLKTYVEKVSELIIKGKLRLRQLAGIDPAEIIVPFTTEEIRKLWEDNEPWQRACANFLGEISSNYPKSDRLNLIKRTSWILPRIVRDAPITGARTFYTDANKSGKAGYKSEELSKVEQSPYNSVQKAELYAILMVLRDFKEPLNIVTDSQYAERVILHIETAEFIPDDTELTSLFIEVQDIIRNRLCPMYITHIRSHTGLPGPLAQGNAEIDQLLIG

SEQ ID NO: 545 - protein, 618 aa, synthetic construct
NKARLKEILEKGQYSQFKNDVGTIKGIKPYEIPGINPGKEKQYPLGPGEEQIKIIVKELEEIGVIEQTKDPVCLTPIQGVLKPGTTDKYRLVHNLKALNKRTTTDQRTLIHARKTLINLPNHKFKTTIDLSNGFWSIPLSEDSKYLTGFQIQGKTYQWTRLPQGFANSPNVFQSVMEEILDDLDVTVYIDDIYFSDETEEAHLTKLEAVLTRLRERGLKIGLKKCTFGAFDVQYLGFEITEKGRQIKAGFCEDLTIPDTALQAEKLLGELEFVSGQVPGYAERAQPCHGVKKGLRQMIGRKTRTFDRPLTSEEQEAFRILIDHVTQSALVLEPRVPKTDIYVKIDLGEQGYTAYCYNESGKTPCAVRSYAYKGAEKSYTEVEKVLLSCFNSLAFLKSTCEPDNIIFITPLHDGIREIRKDTVEVKKAQVSRYSKWLLMQTDPKIHFQGNNKPLKVKTGNDTRATPKRTIEATYYTDGSKTDTDLRAHWGWVAHTPEGRKYHMKGETLGSAQTAELTAVVEALIDARSRKWKTIDVVTDSHYVYLGVTEDLAIWERENMHKQNGDKLAHSTLWQLVSRYRAELDLVVRHVRSHTLNTDPDSKGNSEVDELVQMRKMYIP

SEQ ID NO: 546 - protein, 610 aa, synthetic construct
NKKRLQAILEEGSYSQFRNDCGNMLTPPVNIPGASPAPQKQYPLGKAEEGLAETIDELAQLGIIKETEDKRVTISPIQGVQKPDMSWRLVHNLRELNKRTVPDQSYLINPKKAINSLPNLKFKTALDLSNGFWSVPLDEESQLKTGFQFRRKTYVWTRLPQGYTNSPNIFQDKITDLLSGLPVTVYIDDIYWSHDEEEEHLNVLEEVITRLRNAGLKIGLKKCTVAREQAEYLGFKVTDEGRQIPDDYLKGIVLPTTALEAETVLGKLEYVSQHVPEYGIRSKKCHEVKKGLREGVGRKVKTNNRLLTLEEQNDLAALIEYVGRERKTLTSRIPKTDLRVKVTTTPEGYSLAYFNEGGKEPIMYKSKAWTLPEARYGLIEQNLCACFASLAVSRAIMEPDQIIFETDAPALKEMKKDTLESSKAQISRWGKWQAMQLDPKISFVNKGGKVPKTPKPKERGMPSCTLYTDGSKRQGEDKAQWGLYITGPEKPVRKSGQIYGSARDAEVCAVLEGLIWVRDRKYKVIDIVTDSDYVYRALREDLPIWEKNQMMKQNGRPLQQQNMWILISQKRDGLDIEVRHVNSHTDGSTADHIGNREADMIAQSRAVICP

SEQ ID NO: 547 - protein, 622 aa, synthetic construct
IERIVKESELSEKGELEKLLRKHMDSYAKSKNDCGKVQTKYEHVIQGGIPPPQRQYKINSAAEKEIGETIKELTEQGILRKLPKEELAACNSPLQAVRKPDGSWRLVTNYKALNKVTIPDTRYLINCGEVSGNIGREKNWLSKIDLANGFWSIPLAKESQLRTAFTFGTDHYVWKRLPQGYRNSPNVFQALILEILAGIPVTVYIDDILISTKDEEEHLKILEQTLDRLTEAGLKPSLKKMEIGKHEIDFLGFKLGKDTKALTTSTRVKLEEMQQAGPPKNRKQLQSLLGTLNYIRELIPKYSREAKILYQGTKEGKWQWTDQMEQARLKLISMALESGALERRDETLPLYVQVSEEEEEVTLTLWNAEGICPIAFLTHQQEPTMKRFDENSAERILAAVCKRLLQLKAVAKEQPIVIFSMAGELARLKRNLVMNQARINSHRWDQWSLILGDNQLDWRRIKQKRKDKITRYHENHKHLPKYFTDGSERGGKVKWGYLVKFNGQLITSQKEEIQGTAQLAEVMAVERALQRAVELGHTEIVLTCDSEYVTDGINLELDKWKANDFHTAKGKPMAHRDQWKNIANLLEKVKAHVYHQVSHTQQTNESAEGNRQVDKLIGRVKT

SEQ ID NO: 548 - protein, 628 aa, synthetic construct
IRSLRIEPVLVGKLHMTPIEVPKPTKVISCKQYRIPGGHKEIAETIQDYLRAGVLVTTTTQWNNPIWPVKKSDGSWRMTVDYRELNKVTPPLMAAVPDTVTLIERIQTFQGTWYAVSDLANAFFTIPIAPQFWDQFAFMWQGRQYTFTRLPQGYKHSPTICHRIVAEHLDDIVIPEKIQITHYIDDILVQGFSEAEVQKVLEILIEKLKIKGWEINPSKIQGPSQSVKFLGIYWNQGHRQIAPEAKRAILDFAAPKSKKEAQKFIGLFGYWRAHIPHLGQILQPLYKVTKKKYEFEWGKEQSTAFEEAKIAIQTALDLWPMREGPVELQVTIEDMYASWSLWQKQEGKRVPLGFWSRKLPSAGVTYTPFERQLLAAYWALVETEQLTLGHDILLRPGIPIMQWVLSDPVSHKIGHAQESSIIKWKWYIQNRAKAGPTGIMRLHELVFQSPVDPIDSFSVEQLPKENSPVIWNTGYDDLTQEQKQHAWFTDGAAKYIGQDRYWKAISFNPTTGMILETTGKGKSSQFAELQAVYQAIMYEKGKQCHIFTDSWAVANGLATWLPMWRHNNWRIHDKLLWGNELWKEIWESLSCTNVSVFHVDAHAQVNSKEREYNAKADSLATIAAASLP

SEQ ID NO: 549 - protein, 646 aa, synthetic construct
SLPLVEQNVNPRVWADGKSVGRAQNAIPVVVKLKDPHVFPHKKQYPLKPEVKEGLKPIIENLKEQGLLIPCNSPCNTPILGIKKSNGKWRLVQDLRIINEAVVPLHPVVPNPYTLLSEIPERAKYFSVIDLKDAFYSVPLAEESQFLFAFEDPTQPASQLTWTVLPQGFRDSPHLFGQSLSRDLQNFNSSEAVVLQYVDDILLCAETEEACLRASEDFLNFLAGCGYKASREKAQLCQQSVRYLGLIISEGTRAIGPERIKPILNHPLPMTLRQLRGFWGITGYCRIWILGYGELAWPLYKLIAETQQAQTDKLVWSPETQKAFKVLQTALLQAPALSLPTGSEFNLFVTERKGVALGVLTQPRGPHQQPIAYLSRELDVVSRGWPHCLRVIGAAALLAPEALKIINGRNLTVLTSHDVSGILNSKVNIWMTDSRLLKYQSLLLEGPVTKLKVCGNLNPATFLPEKENETPDHDCSQFLTLNYAAREDLKDTPLDNPDMEIFTDASFFVCEGKCKAGYAVVMAEQVLEAKSLPQETSAQLAELVALTRALELSKGQRVNIYTDSKYAYLTLHAHAAIWKERHFKTATGEPIKHFREIERLLTPIYCPKEVAVMHCKGHSRDGSKIAEGNHLADCQARKAALYETPS

SEQ ID NO: 550 - protein, 621 aa, synthetic construct
ITKFITNLAAVEIPPVILPAPTQASFTPQYPLKGGHQDITKAIQKLLDEDIIELGRSHIYNSPVWPVKKPNGTYRITIDYRNINKVSPVVEGILPNASEVINIIQGDAPRYMAAIDLSDMFFAIPIDKQSRQITTFAWQGKQFQFKRLPQGYKNSPTIAHNILATYIDPKQYKSKIIQYIDDILLYNNDIDTLQEDLDKLIRHLRQHGWTINPEKIQKPDTKVTFLGIHWDSEGRSVPNKVINKPDSLKSPTSKREAQQLMGLFMFWKQHIPYMADIAKPIYKVTRKAVDFEWNEEQEEAFQQLKHYIHLFSQLQNIQSGDKIVLDIAFISEHGNWGLYKKGQEDSRLMPVGFWSKKFPYSYFKYSFFEKLIWTLYAALLHTEPLTGQQPITVRSTLPLKAWLSFEAEDLAGSQIDEKVLAWKWYINTRSTSGAGGLALLTEEVNKLEVEPPTCANKFVPIEPIGVQGPKYSPVLKNAWFTDGSASVSGDRTIWKAAAFCPATQRALTATGESNSAQHAELIATYIAVKEAVDTQKHKIYIFTDSWAVCNGIILWSGKWKQTNWQINGKDLWSKEYWKKLDDLSSQIKIYATLVNAHATDSSKTTLYNKITDQLAKGLTPE

SEQ ID NO: 551 - protein, 648 aa, synthetic construct
EIDTRIMDQVYPGVWAIDVPGRAKNASPVIVKLKEGQGAIRIKQYPLKREDREGIRPNIERFIELKLLKECESEFNTPILPVKKPDGSYRIVQDLRAINKITEDLCPVVANPYYTLLTTLTPDLAWFTVLDLKDAFFCLPLHEASQRIFAFEWENPRSGRKTQLTWTVLPQGFKNSPTIFGNQLAKDLELWEPPSGEGKVLQYVDDLLIATRTEESCIIWTVSLLNFLGLQGYRVSKKKAQVVLQQVTYLGYEISAGQRVLGKARKEAICQAPRPRTVKELQTFLGMTGWCRLWICNYGLLVKPLYSLIAANQKDLQWDAESDRAFHELKKALMSAPALGLPDVSKPFFLFSHEKQGMALGILAQDLGPYRRAVAYFSKQLDATAKGWPGCLRAVAAVILNIQEARKFTLGQKMTVLVSHTGSAVLETKGGHWLSPQRFLKYQAIMVEQDDVEIVTTNIVNPASFLNGNVGESVDHDCLETIEATYSSRTDLKDVPINGAEHWFTDGSSYMLNGKRHSGYAVTTSEEVIESGPLPADTSAQKAEIITLTRALERAQGKPINIWTDSKYAFGVVHAHGAIWKERGLLNSQGKIIKHAEEILKLLNAVQLPERVAIMHIKAHQKVSTELERGNELADREAKQAARKAIKV

SEQ ID NO: 552 - protein, 571 aa, synthetic construct
MSIAPSFALPLKWLTKQPIWVEQWPLTKEKLSALEKIIQQLLKEDRIETSVSPWNSPIFVIKKKSGKWRLITDLRKINTVIQPMGALQPGLPQPSMIPKNWFLTIIDLKDCFFTIPLQPQDREKFAFTIPSLNNNKPTSRYQWKVLPQGMLNSPTLCQFYVNQPLERLRSLFPSALVIHYMDDVLFAHYDKIKLKQLVTKAESVLGEYGLIIAKEKIQEQPPFEYLGNKLDQTRIWPQKVELRRDCLHTLNDFQKLLGDINWLRPSLGIPTYALKNLFLTLQGDPALDSPRSLSTLAEKELLQIEQIMQTAYLDRIDPNEPVVLVVFPSQHSPTGIFWQKDLILEWLFLPNKEQERLSTYLDKICKIIAKGRLRLRHLIGTDPQQIIVPLTQQEILCQYKLSNEWQLALQDFLGDIHNNFPKNKRLQFLKKTQWILPSIVKTKPIPKADTFFTDANKLGMAGYTGPKTRVEQTPFRSVQKAELAAIIMLLQDYSDPLNLVTDSQYAEHTVKEIETATLIADGSEIVQLFSILQLLIRNRSQPIFITHIRAHTALPGPMSAGNEQIDRLLIG

SEQ ID NO: 553 - protein, 647 aa, synthetic construct
SHPRISHPVNPSVWDTDNPSIAQCPPVSIQLRDPTKFIHQPQYPLTTSTLLGLSPIISDLLHKGYLRPTQSPYNTPILGIKKPNGSYRLVQDLRSINAAVIPIHPLVPNPYTLLSLIPASSTHFSVLDLKDAFFSVPLDPSSQDLFAFTWTDPHTRHSEQLTWTVLPQGFRDSPHLFGQTLSHDLKNFYPTCPLSTLLQYVDDLLLCNPSWDISQRDTAALLNFLAQHGYKVTPSKAQISASQVTYLGFLLTPQHKSITTDRKQALSSWPVPKTKAEILSFLGLAGYFRAWIPNFSLLAKPLYNLSKGDPNEPLPSSPKTPFNNLRLKLLSAPALHLPDLTRSFLLYVHENQGQALGVLGQMQGPTFAPVAYLSKQLDPTVRGWAPCLRVLAAAQKLQQETFKLTFGAPLTICSPHHLKDLLAYKSLHTLPPSRVLALITSFLENPSISFQSCSPLNPATLLPVHPTPEPPLHNCLETLQSLTHSPSTIVEGPLPHADHNWFTDGSSYRSPTAPKAGYAIVSLTATIEAQPLPLGTTNQQAELIAATRACILAEGKTLNLYTDSKYVFHTLLSHSAIWKERGFMTTRGNTITNSDLIHKLLQASQLPTRLGIIHRKAHKKDNSPSTQGNRLADAAAKNAAFSKSSET

SEQ ID NO: 554 - protein, 613 aa, synthetic construct
GSPTASIRLLQQAPALPPSKTVNVKPYALPLGAREGITPVIAELREQGIIVPTHSPYNSPVWPVRKPNGKWRLTIDYRRLNANTGPLTAAVPNIAELIATIQEQAHQILATIDVKDMFFMVPIQEADRDRFAFTWEGVQFTFTRLPQGYCHSPTIAHYALAQELAQIPPREGVRIYQYIDDVLIGGSDAAAVGQTQTEIITHLENLGLQIPAEKVQLPSSEVKFLGIWWRGGTVCIPPETLTTLEEVKSPENKKELQHALGLLVFWRKHIPDFSIIARPLYDLTRKRATWDWTPVHEEALKLLIFEAGVYQALGPIHPTDPFQIEWGFAIHGLSIHMWQRGPEGTTRPIGFHSRSFKDAEKRYSIWEKGLFVVTLALQEAEKIIRQQLIILRGPFKVLKPVLAGTPPPVGVAQRDTVRKWYAQLDHYCHTYQIEEGAPKVLKIQDPPSDHPEPPPSYIKPAPPFETHLKNVWFTDASSRREGKVWKYRAVALHVDSGDRIITEGEGSAQVGELTAVWSVIVKEAETTEPVFIYTDSYAVFKGCTEWLTFWEQNHWEVNRVPVWQREKWEEILNIAKRKSFLVGWVAAHQSGNHPAHLLNNQVDSMTRLMRTAT

SEQ ID NO: 555 - protein, 426 aa, synthetic construct
MDTSSLMEQILSKENLNAAYLQVVRNKGAAGVDGMNVEELGAYLSENGENIREQLRTRKYKPQPVRRVEIPKPDGGVRNLGVPTVVDRFVQQAVAQVLTPIFEEQFHDHSYGFRPNRCAQQAVLKALEMMNDGHSWIVDIDLAKFFDTVDHDKLMTIFGRTIKDGDVISVVRKFLVSGVMIDDEYEDTIVGTPQGGNISPLLANIMLNELDNELEARGLNFVRYADDLIIMVGSKQAADRVMKSVTRFIEEKLGLKVNAEKSKVDKPKGIKYLGFGFYFDTFAKAYKARPHPKAVTKFKAQMKKLTCRSWGVSNAYKVQKLNQLIRGWINYFKIGNMKRLCQRLDSNIRYRLRMCIWKHWKTPKNRAKNMMKLGLPAWAAWRSAYIHGYARVCRSRDVHRTITSERLKQFGLMSMTDYYTERSVAC

SEQ ID NO: 556 - protein, 427 aa, synthetic construct
MDTSSLMEQILSKDNLNAAYLQVVRNKGAAGVDGMTVEELGAYLSENGESIREQLRTRKYRPQPVRRAEISKPDGGVRKLGVPTVVDRFVQQAVAQVLTPIFEEQFHDHSYGFRPNRCAQQAVLKALEMMNDGHSWIVDIDLAKFFDTVDHDKLMTIFGRTIKDGDVISVVRKFLVSGVMIDDEYEDTIVGTPQGGNISPLLANIMLNELDKELEARGLDFVRYADDLIIMVGSRQAADRVMKSVTRFIEERLGLKVNAEKSKVDKPKGIKYLGFGFYFDSFAKAYKARPHPKAVAKFKAQMKKLTCRSWGVSNSYKVLKLNQLIRGWINYFRIGSMIELCKRLDENIRFRLRMCIWKHWKTPKNRAKLLMLLDVPRWAAYKIAYSGNRYARITHNGWVHKAISNKRLAAFGLISMEDYYAKRRVAC

SEQ ID NO: 557 - protein, 427 aa, synthetic construct
MDTSSLMEQILSKDNLNAAYLQVVRNKGAAGVDGMTVEELGTYLSENGESIREQLRTRKYKPQPVRRVEIPKPDGGIRNLGVPTVVDRFVQQAVAQVLTPIFEEQFHDHSYGFRPNRCAQQAVLKALEMMNDGHDWIVDIDLAKFFDTVDHDKLMTIFGRTIKDGDVISVVRKFLVSGVMIDDEYEDTIVGTPQGGNISPPLANIMLNELDKELEARGLDFVRYADDLIIMVGSRQAADRVMKSVTRFIEERLGLKVNAEKSKVDKPKGIKYLGFGFYFDSFAKAYKARPHQKAVAKFMAQMKKLTCRSWGVSNAYKVQKLNQLIRGWINYFKIGSMKGLCERLDCNIRYRLRMCIWKHWKTPQNRAKYLMQLGIGRKYAWSTAYTGARIAYVCQRGAMNMAITKERLTRFGLVSMADYYAKRRVTC

SEQ ID NO: 558 - protein, 426 aa, synthetic construct
MDTSSLMEQILSKENLNEAYLQVVRNKGAAGVDGMSVEELGPYLSENGENIREQMRTRKYKPQPVRRVEIPKPDGGVRNLGVPTVVDRFVQQAVAQVLSPIFEEQFHDHSYGFRPNRCAQQAVLKALEMMNDGHNWIVDIDLAKFFDTVDHDKLMTIFGRTIKDGDVISLVRKFLVSGVMIDDEYEDTIVGTPQGGNISPLLANIMLNELDKELEARGLDFVRYADDLIIMVGSRQAAERVMKSVTRFIENKLGLKVNAEKSRVDKPKGIKYLGFGFYFDSFAKGYKARPHMKAVEKFKEQMKKLTCRSWGVSNTYKVKKLNQLIRGWINYFKIGSMKNLCRKLDAHIRFRLRMCIWKQWKTPKNREKNLIKLGLPRYAAHGISYAKGYARVCRSWNLHISISKERLAKFGLISMEDYYAERRVTC

SEQ ID NO: 559 - protein, 429 aa, synthetic construct
MDTSSLMEQILSNENLNAAYLQVVRNKGAAGVDGMEYTELQKHLSENGEIIKEQLRTRKYKPQPVRRVEIPKADGGIRKLGVPTVTDRFIQQAIAQVLTPIYEEQFHNHSYGFRPNRCAQQAVMKALEMMNDGHSWIVDIDLERFFDTVDHDKLMTIIGRTIKDGDVISIIRKFLVSGIMVDGEYEDSVIGTPQGGNLSPLLANIMLNELDKEMEARGLDFVRYADDCIIMVGSRQAAERVIRSITRYIEEKLGLKVNASKSKIDKPKGIKYLGFGFYYDSFAKEYRAKPHAKAVEKFKARMKELTCRSWGVDNGYKVKKLNELIRGWINYFKIGSMKGLCEKLDANIRYRLRMCIWKHWKTPQNRAKNLIKLGISRRYAWSTAYSGARIAYVCQRGAMNIAVTKERLTRFGLVSMLDYYVERRSLMLS

SEQ ID NO: 560 - protein, 434 aa, synthetic construct
MELIDWILADQNIDAAIWAVKHNRGAAGIDSMQVDELDEYFKNHREEIKQLIREKKYVPQPVRRVYIPKPDGKQRPLGIPTVVDRVIQEAIAIVLMKGYDRYFSEYSYGFRPNRNCHQAVTKALEYMNSGYEWVVDLDIEKYFDTVNHDKLVSILRERINDDTTLHLIRAFLKAGVMENGLVSPTEQGVPQGGPLSPVLSNVYLDKLDRELENRGLHFCRYADDCTIYVGSEMAANRVMRSIADWLGRKLKLRVNMTKSKVVRPSGSQFLGFRFWKSPREGWKPKPAKERCKRLKDKVRAILCRRKAVAVPLGVTITKLNQLMRGWINYFCLGSMKGFMKEFGEWMRHKVRVVILKQWKKADTIYRNLRKTNRICRCGISDEEIYKVAYSGRGWYKRATHNAVNFILSPQVLSQRTKQRPGLVDPLKYYLARCT

SEQ ID NO: 561 - protein, 463 aa, synthetic construct
MGTENRESCSQRDSAERKGYVRAHRSFNRIWKERDSAEPDILGKILEKDNLNRAYKRVKANKGAPGVDGMTIEATLPWLKEHNHELVERIRKGKYTPSPVRRVEIPKPDGGIRKLGIPTIIDRIIQQAMLQPLLPIYEPLFSDDSFGYRPGRGAKDAIFRIKEYIEQGYTRAVVLDLSKYFDTLNHTILLNLLRRQVKDERVIQMVKRYLKSGVMENGVVAETEEGSPQGGNLSPLLANVYLNEFDWEFHRRGVPCIRYADDIVLLAKSERAAERLLESSAKYLEETLKLKVNREKSRTVSVFAIRNFKFLGFCFGKNGKGIYIRIHGKSWKKAKDKLRQLTSRSRCGSIVRTMEKIKVYMRGWLNYYGIADMKNNMESLNGWLYRRIRMCIWKQWKLPKTRKRKLAGLGVDSHYAATIAYDRKGYWFNAGNKAVNWALSKERLTNWGLYDLATAYQSVHVNY

SEQ ID NO: 562 - protein, 426 aa, synthetic construct
MKLIETILFSENVIKAQSRVLSNKGGAGIDGMHVDELAEYMRANWDGIKESILVRKYNPAPVRRVEIPKVNGGVRKLGIPTVLDRTIQQAIVQVLSPIFENEFQENSYGFRPCRSCEQAILKLLEYLNEGYEWIVDIDLEKFFDNVPQDKLMSYVGRVIRDPDTESLIRKYLKSGVMENGIYEATEEGTPQGGNLSPLLSNIMLNELDKELVNRGLHYVRYADDCVIAVGSEASAKRVMRSVTTWIERELGLKVNASKSHICRPTKLKYLGFGFYRNPQNRQWQSRPHESSVSKFVRSLKRLCKRSWSVSMTDRITRLNYVTRGWINYFSISFMKLKLEKIDEHLRTMLRKVIWKQWKTPQKRAWGLRKLGVDSALARRTSFCGDRYEWVVRRTCVARAISKDVFTRRGLVSCLDYYLIRHSLKTS

SEQ ID NO: 563 - protein, 466 aa, synthetic construct
MESYLTQDRAEPEAGCGANSVSDTEGDGRTVQHDLVEEVVSWSNLEAALKQVVSNRGAPGVDGMTVDELGPWLETNYSELAEKVRNGRYRPNPVRRKEIPKPNGGVRDLGIPTVVDRLLQQAVSQVLMPIYEPSFSDTSYGFRPGRSAHDAIQKAKEYLSEGFGYVVDLDLARFFDTLNQDYLMNILRERVRDKALLELIKRFLRSGVVLPNGLLRETREGSPQGGPLSPLLSNIYLDRFDKLLESRGLRFVRYADDCLVFVRTPRAGERVRESVTRYLEGTLRLRVNQEKTVVGRADQVKFLGFRLYRQKTVGATVHDSSLARFRKEVRRITKRNRGTSLGSVLTELKTFTRGWVGYFRIGLSKSRAEKLDGWIRQRVRQYIFKQWKTLRNRASQLVSLCPDYLRPRPGFTPYSWVRECRRAAFSRSYWKAVNYPVVKRALSNSYLAGLGLYSLSEQLEKWNKGV

SEQ ID NO: 564 - protein, 468 aa, synthetic construct
MKDGMQKTSALANDYPQRNRTESERYGGVQTFMWMTEDNIVEVPFDKEHLLEVILSPDNLNKAYKAVVRNKGCGGIDKMSCEQLLPWLKANKDELIRSLLDGTYRPNPVRRVEIPKDNGKMRLLGIPTVVDRMVQQAINQVLTVIYEPQFSKRSFGFRPRRGCPTALREVQKIVNEGYKYVVDLDLERFFDTVSHSKLIEILSRTLKDGRVVSLIHRYLRSGVIDKGLWHASEEGTPQGGPLSPLLSNIMLNELDKELARRGHPFVRYADDSMIFCKTKRAAERVRESITKFIEGKLFLKVNKEKTAVSYIKGVRYLGYSFYIHKGKCQLTVHPKSKARMKSRLKELTSRSNGWGYEKRKQKLKEYIQGWVGYYHLADMKRLCMETDKWLRRRIRMCIWKAWKKPRTKVANLIKCGIAEWQAYQWGNTRLAYWRIAHSPILLTAISNDRLRKQGYMCLMDLYLEWNPK

SEQ ID NO: 565 - protein, 456 aa, synthetic construct
MSLGRAVHQKPGDTGRSAGRRGEAEPKAMRDEARTARHETASPGREDLLGQALASANLEAAWKRVKSNRGSAGVDGLSIRDTAEHLKMHWPRIRASLLDGSYRSQPVRRVQIRKPDGGMRELGIPTVTDRLIQQALLQVLQPRLDPTFSEHSHGFRPGRRAHDAVLEAQRYVQSGYRVVVDVDLEKFFDRVNHDILMARLARRIDDKAVLRLIRRYLVAGIMDGGVVMERYEGTPQGGPLSPLLANVLLDEVDRELERRGHRFVRYADDCNVYVRSRRAGERVLAGLRRLYERLHLKVNEAKTAVAPSSRRKFLGYAFWYGPGGQAKCRVADKAKETFKQRIREMTRRSGGRSLPDIVERLQTYLPGWKAYFQLAQTPKVFHELDEWIRHRLRAVQLKHWRRGKTMYRELKTMGASETDARQVAANSRRWWRNSRFLLNRAMPIAYFDRLGVPRLS

SEQ ID NO: 566 - protein, 471 aa, synthetic construct
MQVDKVFLMTDNLSSTQCRNETLLGADGIRARVAGPRPKGVSVKATPSWTKADPGWCNIEKVVNSIIIDEALSKVISNRGSGGVDHITTAELRDYWSKYGGTIRQKIVQGTYIPLPVKRVDIPKPNGDKRMLGIPSVIDRVIQQALVNVLEPVFDPQFSEFSYGFRKGRNAQQAVLQAQSYIKDGHRWVVELDLSKFFDRVNHDILMSRVARVVEDKRILKLIRRYLNAGIMEDGIVKPRSEGVPQGGPLSPLMSNIILTELDRELEKRGHKFCRYADDCNIYVKSEEAAKRVLESVTKYLEGGLKLRVNRDKSGTFRPYESVFLGYSFHRRNWTRIVVAEESIKRLKTKLKIIYRHSRGTSLGTAIKKLNQILRGWRTYFKLDTRKGFFEKLDINIRTHLRVLIWRAWKRPRTRERELRKRGLDAFNAWKSANNGRGPWYNARAPHMRIAIPNALFVRLGLYNLSSMGTV

SEQ ID NO: 567 - protein, 429 aa, synthetic construct
MVSLEKILEPSNLTEALKQVVSNKGAPGVDGMAVDELEPFIRNHPGVLSQAIRDGSYRPSPVKRVYIPKDNGEKRPLGIPTVVDRLVQQAIAQKLSEEYEPNFSDNSFGFRPKRCAHDALKRIVDNANDGYEYVIDLDLAKFFDTVNHSKMIQVLSETVKDGRVVSLVHRFFRAKINDEGKIIKPAIGMPQGGPLSPVCANILLNELDQLLDGRGHRYVRYADDMLLQFRSLRAAERVFTSVKRFIEEKLFLKVNVEKTKICHLSKDVKFLGYSFYKSYDKDDLDGKGKWKLVVHGKKRRSFEQTIKTLLDRKCPKGLERCKEDLKLYLCGWTNYFYMGLSRSRRQSYDKWIRRRIRQLYWKIWKKPSTRIRALMQLGIERSKANEWGNSSKAYWRVAGSWILKRSLTNDVLQNLGWIWLGIARKWSPQ

SEQ ID NO: 568 - protein, 471 aa, synthetic construct
METRHGMKYRQLHIEDYLGEIPAEQGRGTGVYAHEWITGNPDTNTDFWTDNLLDAILRSDNLNAAYKRVKSNRGTGGIDRMQVDELLPYLRNHRDELIRQLREGKYKPNPVRRVEIPKEGKDKVRKLGIPTVVDRMIQQAIAQELTAVYEEQFSENSYGFRPGRSAHDALEKCREYVNEGYIYAISMDLQAYFDTVNHSKLIEVLSRTIKDGRVISLIHKYLKAGVMEDGGFHATSEGVPQGGPLSPLCGNVMLNELDKELERRGHKFVRYADDCIVLCKSRKSAERTLKHIIPYITKKLYLKVNLEKTTVSLVSKVKYLGYGFYRNKGKCRMRVHPKSIRKMKNHLRELTVRGNKWSNPEREEKLRRYTTGWINYYRLADMKSLMETTDEWLRHRIRAVYWKQWKKVRTRYKILRTLHLPEWKVHELANCRKGTWRAASTLNSVLTKTVIVDRLGYPSMTAHYLKVRVNY

SEQ ID NO: 569 - protein, 435 aa, synthetic construct
MCEIRKVETDMELLEEVLSKDNLNKAYKQVYKNKGASGVDGVTVDELFSYIQEHKEEILWKIRNRKYKPQPVRRVLIPKDNGKMRKLGIPSVIDRVIQQAIVQVLTPIYEEQFSNHSYGFRPKRSCEMAVVQALEYFNDGYDWIVDIDLQSFFDEVNQDKLIGIIRRTIKDGDLVSLIRKFLQSGVMENGVLQPTKKGTPQGGNLSPLLSNIMLNELDKELEARRLHFVRYADDCLILVKSEKAANRVMESITKFITKKLGLKVNVEKSKIARPDDIKYLGFGFYKKINQNEWRPKPHIKSVQKFKTKLRDILVRSRSISLDDRLLRLKQLIYGWVNYFRIADMTILLRDIDGNIRRKLRVIIWKQWKKIKKRYACLRKLEITHRDAYVTANSRSGYYHISHTRVLEKAISKERLNKRGLVNSLDYYLKVHIITN

SEQ ID NO: 570 - protein, 463 aa, synthetic construct
MSKAMRQMPGQPGRVCVAHGEAVRDLISDEAGGPPREHPDTGSATPPTGPGGLLAAMLTRQNLQLAWKRVKANKGAAGVDGLDIEQTAQTLRTRWPDIRQSLLQGRYRPSPVRKVMIPKPDGTQRELGIPTVTDRLIQQALLQVLQPLIDPTFSEHSYGFRPGRRAHDAVKAARAYVQSGKRVVVDVDLAKFFDRVNHDILIDRLNRRVDDAGVIRLVRAYLNAGIMDGGVVVDRHLGTPQGGPLSPLLANVLLDEVDKALEARGYCFARYADDCNVYVGSKKAGERVMAYPYLRRLYVNLKLQINEAKSAVASAFGRKFLGYALWVAKGREVKCKVAQKPLQNFKARIRQLTRRSGGRSMAQVVDKLRPYLLGWKAYFGMAQTPGVWRGLDEWLRHRLRAIQLRQWKRPKTIHRELKALGASDDVAKQVAGNCHRWWRNSDGVIKRVLAIAYFDRLGVPRLS

SEQ ID NO: 571 - protein, 450 aa, synthetic construct
MQQKTYRDPDAGRRGEAPDAGSQGAETVQAPTTRESPSSTAWLMEAICEPVNLRHALKRVKANKGAAGADGMSVSELPDYLRHHWPELKAQLLSGSYRPSPVRRVTIPKPGGGERLLGIPTVVDRFIQQAMMQVLQAQWDATFSDSSYGFRPGRSAHQAVKQAQKYIESGYSWGVDLDLEKFFDRVNHDVLMSRIAKRVSDKRVLSLIRGYLNAGVMEAGLVMPVTEGTPQGGPLSPLLSNLLLDDFDKELEKRGLKFARYADDCNVYVKSERAGNRMMAGLTHWLNRKLKLKLNAKKSAVALPETRKFLGYSFRRGRKVWCVVSPESVKRFKTRIRELTGRNTGKSLEQLIEPLKRYLTGWKSYYGLNQWQTLMRDLNRWIRRRLRSVLWKQWKTGSKRFKELRRRGVSKDLAAQTVGSCHKQWRISCSPALSIALPNRLFVRLGLPEL

SEQ ID NO: 572 - protein, 469 aa, synthetic construct
MRSQEGRRQQKAPEGAYLWEEMVKPWGTTGGPSPSSAQGGATPRGGQGSGLMEQVVERSNMLAALRRVERNGGAPGVDGIPTERLRDQIRAEWPRIREELLAGTYRPKPVRRVEIPKPGGGKRLLGIPTAVDRLIQQALLQVLTPIFDPQFSEASYGFRPGRRAHDAVRKARQYVEEGYEWAVDLDIEKFFDQVNHDILMARVARKVTDKRVLTLIRRYLQAGVMVNGVVIETGEGTPQGGPLSPLLANILLDDLDKELEKRGHKFVRYADDCNIYVKSKRAGERVMASIRKFLQERLKLKINEQKSAVDRPWKLKFLGFSMHKRKTGEILIRLAPQAIERVKGKIREITARNKPVSMAERIERLNTYLGGWIGYFALAETPSVFEEIEGWMRRRLRMYLWKQWKRVRTRYRELRALGLSEWVVHQFANARKGPWRMAHGPMNRALGNAYWQSQGLMSLTERYQSLRQA

SEQ ID NO: 573 - protein, 459 aa, synthetic construct
MVKPLRLDRRAERSPTPSEGMSEAVGEGVWEQVFERKNLLSALKRVEANGGAPGVDGMTVEALRPYLKAHWLELRAALDSGNYRPSPVRRVEIGKPDGGVRLLGIPTVVDRLIQQAIGQVLTPLFEPVFSPHSYGFRPGRRAQDAVEAAQGYIREGYTWVVDIDLEKFFDRVNHDKLMARVARAVKDKRVLKLIRRYLQSGVMVNGVVMETEEGTPQGGPLSPLLANIMLDDLDKELERRGHRFVRYADDCNIYVRTERAGERVMDSVRGFLEKKLKLKVNEKKSAVARAGQRKFLGFSYFYRKGEVLIRVAEQAQQRLREKLRGLTRRTRSGRLEEIIQQLKEYMRGWMGYFRLADTPSVFAGLDHWLRRRLRQLLWKRWKRGTTRWRELVSLGVPRRLAGLGATGSSPWRMAGTPVVHMALSNAFWDAQGLCSFTEYYHQLHLPRRTAGCGPACPVV

SEQ ID NO: 574 - protein, 456 aa, synthetic construct
MGEVRVKPGGTPRGRSIDRQDLKLILRREKYRMDLMEQMLSRENMLQALRRVEANKGAAGIDSVSTRQLRAHVVQHWETTKAKLLAGTYKPSPVRRVEIPKPDGGVRLLGIPTVMDRLIQQAILQVLTPIFDPTFSPHSYGFRPKRRGHDAVRQAQEYIREGYRYVVDIDLEKFFDRVNHDILMSRVARKVKDKRVLKLIRAYLKAGIMAEGIRVRSEEGTPQGGPLSPLLANILLDDLDKELERRQLRFVRYADDCNIYVKTRRAGERVKRSITKYLEKKLKLKVNEAKSAVDRPWKRKFLGFSFTFHKEARIRIAPKSLKRVKDKIRSLTRGNHLTSMETIIEDLNRYLMGWMGYYALMDTPSTLKALDEWIRRRLRLVLWSRWKRVRTRYRMLRALGLPERDVHKLANTRKGAWRTSKTPQMHKALGIAYWKSQGLMSLTERYFEIRQGWRTA

SEQ ID NO: 575 - protein, 453 aa, synthetic construct
MKETKKCDESRQLNIQTGHLQKDRVELESYAKAPSISVTSDNRQNARRECHYGLLENIISSENLNEAFKRVKKNKGSHGEELRQSIADGSYKPNPVRRVEIPKDNGKIRPLGIPTVVDRVIQQAISQVLTPIFEKKFSENSYGFRPNRSAHQAILKCKEYMDEGYRWAVDIDLEKYFDTVNHDKLIGLIYKEIKDIRVIGLIRKYPNAGVMEKGLTSLTLEGVPQGGNLSPLLSNIMLNELDMELERRGLRFCRYADDCNVYVKSKKSAERVMKSITKFIEKDLKLKVNKEKSKVDRPWKLKYLGYTFYTKKGEMGIRVHQVSIKKLKGKLKSITGRSNAMSMELRAVKLKQLIVGWIGYFKLADMKSTLRELDEWLRRRLRLCYWKQWKKIKTKHDNLVKLGVENWKAWEHANTRKGYWRISNSPILATTLTNKYLREQGFITLSERYSQVR

SEQ ID NO: 576 - protein, 455 aa, synthetic construct
MSMCEALRQMPERSGRVPLADGEAGRASASDEATRPRHETGSTGSALLMAALTRENLQQAWKRVRANKGAAGVDGRDIPETACYLRTAWPVIRDQLLQGTYRPSPVRRVTIPKPDGGERELGIPTVTDRLIQQALLQVLQPLLDPTFSENSFGFRPGRSAQEAVVRAQAYVQSGRRIVVDVDLEKFFDRVNHDILLGRLQKRIGDAGVLRLILAYLNSGIMQNGVVVSRYQGTPQGGPLSPLLANVLLDEVDKELERRSHCFVRYADDANVYVRSQRAGERVMALLRKMYAKLHLTVNEAKSAVASAFGRKFLGFSFWVAPQGEIKCKVAAKPMATYKQRIRQLTRRSGGRSMAEVVENLRPYVLGWKAYFRLSQTPGVWRTLDEWMRHRLRAIQLKHWKRGPTMYRELKALGASETVARRVAGNARSYWRNADRLLKTILTIAYFDRLRVPRLS

SEQ ID NO: 577 - protein, 419 aa, synthetic construct
MMMEQVVSRQNMLAAYQRVVRNHGSAGVDGVTVEDLAEYSRLHWERIRTELLEGRYQPQPVRTVMIPKPGGGERELGIPTVMDRMIQQAVHQVMSPQFDAGFSEASYGFRPGRSAHGAVERAREHMTAGHRWVVDIDLERFFDRVNHDVLIARVSHTVKDKRVLRLIGCYLSAGLMQGGVVSPRSEGTPQGGPLSPLLSNILLDVLDKELERRGHRFVRYADDCNVYVQSRRAGERVMGSLRVWLEKRLRLKINASKSAVDRPWHRKFLGYSVTTQKRPRLKVSAESVKRMKQRLRELLRIGRGRSLRTVIATVAVYLRGWLGYYRKAEVRNVFEDLDQWLRRKLRRIMWKQWKKPKTRYRKLRAYGVAPDQARRSAWNGRGPWFNAGASHMHLAVPTKLLRNWGLPSLLDEHQRLQRL

SEQ ID NO: 578 - protein, 484 aa, synthetic construct
MISMQTVKAEVSERAAETQSTDRKSTKLPLGADVGAATSEQTKSEGHSLMEQVVERSNLWLAYQRVVRNKGAPGVDGLTVGEFKDWLKMHWPSVKKALLEGDYLPRPVRRVDIPKASGGMRTLGVPTVVDRLIQQALHQVLQPLFEPTFSQGSYGFRPRRTAHQAVRRAQSYIREGKRWVVDLDLEKFFDRVNHDVLMARVARQVRDARVLKLIRRFLEAGMMREGLVEPRSEGTPQGGPLSPLLSNILLTDLDRELERRGLAFCRYADDCNIYVGSRVAAERVMGGIRTFLEEVLRLRINPAKSAVARPWERKFLGFSFTAQREARLRIALQSVRRLTERVRELLRAGRGRSLAHTIDTLNPLLRGWISYFQLTQCKGVLEELDGWVRRRLRCVLWRQWKRSRSRARHMRALGLDAARARCSSQNGRGSWWNAGASHLHQALPAAYFKLGAGLAVARATATPVCSLNRRMRNRTSGGVGGRRA

SEQ ID NO: 579 - protein, 467 aa, synthetic construct
MKEGKQKISKDTCQQKDRAEPDGYAGGQTFIWMTENNITNVDNSKYGLLEYILSPQNLNAAFKRVKSNKGSGGIDKMEVESLGDYLICHKESLIQSILDGNYRPNPVRRVDIPKDNGQKRSLGIPTVVDRVVQQAIAQVLSPIYEKQFSPNSYGFRPKRSAHQALIKCKEHITSGYKYAVDMDLEKFFDTVNQSKLIEILSRTVKDGRVVSLIHKYLRAGVVVRNKFEESKMGVPQGGPLSPLLSNIMLNELDEELEKRGHHFVRYADDMLILCKSIRSAKRTKATIIAYIEGRLFLKVNKDKTCVAYISKIKFLGYSFYVNKKKGRLRLHPKSLAKMKEKIRALTSRSNGWGDAKRKLELKQYITGWLNYFKLADIKSLLSRIDEWYRRRLRMVIWKQWKRVRSRGRNLIKLGIAKYKAWEYANTRKAYWRTSNSPILNTSITNERLKQAGYIFFADYYRKVNGVN

SEQ ID NO: 580 - protein, 465 aa, synthetic construct
MKGRMQKISKDTWLQKDRAEPDSYAAGQTFMRITENNLTDVTTLEDGLLEQILSPSNLNRAYKKVRSNKGKGGVDKMGIEHLQDYLVENRVELLQSIRDGKYRPKPVRRVTIPKENGKKRLLGLPTVVDKVIQQAITQVLSPIYEKQFSAYSYGFRPGRNAHQALKKCRDYISDGHIYAVDMDLQEFFDKVSHSRLVEILSRTIKDGRVISLIHKYLRAGVMIGNKFEETELGVPQGGPLSPLLSNIMLNELDKELQRRGHRFVRYADDLMIVCKSKRSAGRTLRNIIPFIEDKLFLKVNREKTNVSHVSKIKFLGHTFYRSHGKGRFRAHPTSIRKMKQRLKQLTSRSNGWGEDQRKESLNHYVRGWVNYFKMADMKSLLRKIDRWYRRRLRMCIWKQWKRIRTKGKMLIKLGLNKWKAWEYADTRKSHWHIANSFILTRTITTHRLRQAGYPFLLDYYSKVRT

SEQ ID NO: 581 - protein, 470 aa, synthetic construct
MRGVKPTMEKKLTKMKVSNQSGYTGFSIFSLGEICLEEVTDGYNLEKALKCVARNKGAPGMDGVETKDYALHRQIAGFKDLIDDISAGTYRPKPVKRVYIPKENGDKRPLGIPTVEDRVVQQALANILSKYYEEEFSDNSFGYRPGRGCRQAVKRALKYVNGGRQWVIDLDLSKFFDTVNHSKLLQILSEKIKDGRVISLIHKFLRTPIYENGVVSPKSKQGTPQGGPVSTILANIILNECDQMMDKENIKFVRYADDMMIFCKSKEAAERTLNKVTKFLEKTLFLTVNKEKTKILWYTHGTQFLGFTLSQYVPKHIKKIAPKCKVYVKVHPKKREKFQKGIKETLDRRAPGGIEETKKKFNQKIRGWFNYFKGSIPQKWMEETDAWMRRRIRQMYWKQWKTPQNRMENFSKLNPKSPSRRDYAYSNNSYWRMARTKQMHNALSNRTLTSMGWLSLQELNAQYLQEMSGN

SEQ ID NO: 582 - protein, 424 aa, synthetic construct
MELLEQILSNSNLNEAYKKVYRNKGASGVDGVTINELKEYLQNNKHKLLSEIRARKYKPQPVKRVEIPKASGGVRKLGIPTVVDRVIQQAINQVLTPIYEEQFSESSYGFRPRRSAQGAVLRSLELINDGYDWVVDIDLERFFDTVHHDRLMNIISRTIEDGDVISLIRKFLVSGVMIDNKYEDTIIGTPQGGNLSPLLSNIMLNELDKELEIRGLDFVRYADDCIILVSSKKSANRVMASVTNFIEKKLGLKVNVTKSKVDRPNNIKFLGYGYYYDGKEGKYQLRPHEKSIQKFKRTLKRLTKRSWSVSLNYRLFKIRQVIMGWIQYFKYGKMKSKLKVIDSKLRARIRIVIWKQWKVPKKQINSLMKLGISLDEAKGITYCRKGYQFIGHSKVIQKAINNSRLKKRGLTSALDHYLKVQTVI

SEQ ID NO: 583 - protein, 424 aa, synthetic construct
MELLTQILSNSNLNEAYKKVYRNQGASGVDGVTINELKEHLRENKHKLLSEIRTRKYKPQPVKRVEIPKANGGIRKLGIPTVVDRVIQQAINQVLTPIYEEQFSDSSYGFRPLRSAQGAVLRSLELINDGYDWVVDIDLERFFDTVHHDRLMNIISRTIKDGDVISLIRKFLVSGVMIDNKYEDTIIGTPQGGNLSPLLSNIMLNELDKQLEIRGLHFVRYADDCIILVKSKKSAERVMTSVTNFIEKKLGLKVNATKSKVDRPNNIKFLGYGYYSDFKEGKYQLKPHEKSIQKFKRKLKRLTKRSWSVSLDYRLLKIRQVIMGWIQYFKYGKMKTKLRGIDSKLRARIRVVIWKQWKVPKKHISSLIKLGILKDQAKGITYCRKGYQFIGHSCVIHRAISNSRLKKRGLTSALDHYLKVQTVI

SEQ ID NO: 584 - protein, 423 aa, synthetic construct
MELLDKILERENLNKAYKHVKANKGAPGVDGVTVDEAYENIRQNKEKWLHQIRKRTYKPQPVRRVQIPKENGKMRNLGIPTVFDRIIQQAMVQVLSPIFEEQFSETSYGFRPGRCCENAVVKALEYLNDGYEWIVDIDLERFFDTVDQDRLINIIMRTIKDGDVVSLIRKYLSAGVMDKGVTKATEKGTPQGGNLSPLLSNIMLNELDKELEARGLRFVRYADDCIILVKSEKAANRVLESITKYIEKKLGLKVNAEKSKVTRPTKTKYLGYSFWKDTKGKWKPKPHLKSYQKIKRKLKQLTCRRISISLDERIKQINYAIRGWVNYFRIANMKNAIQEIDEHLRTRVRVIIWKQWKKASRKEKALLQLGVKPDIAHNLANTSKGYQLVAKTDWLKFAINIERLRKRGLIFLSDQYQKVHVEI

SEQ ID NO: 585 - protein, 463 aa, synthetic construct
MNAENLIDESCPQRTSAEHEKYAGAQSAAPRESEAEDRADLLERILDRDNMNEAFKRVRANKGAPGIDGMTVEAALPWLIEHGKELIDSLRDGTYKPQPVRRKEIPKPDGGIRKLGIPTVIDRMIQQAITQQLTPIYEPIFSDNSYGYRPHRNAQMAIRKAKEYADEGYTVAVEIDLTKYFDTLNHDLLMNTVREEVKDKRVLELIKKYLKSGVMANGLLIKTEEGSPQGGPLSPLLANIYLNKYDHEMTRRGVKEIRYADDIVLFAKSKRAGERLLESSRRYLEKKLKLKLNSEKSKVVSTYSPRKFKFLGYALGKSRQGTFIRIHAKALKKAKEKLKELTSRSQGRKICEVFARLKRFVNGWINYFGIARIKKTLEDWDGWLRRRIRMYIWKQWKKTRRRKENLMKLGVPEWRACEAAYSRKAYWRSAKHASVHSALTNERLARAGYYSLSERYESLHLYD

SEQ ID NO: 586 - protein, 459 aa, synthetic construct
MVRSRKERMREEDKSRPNTRLCEQLISLANIQQAVKKVMQNKGSAGIDGMEVTELPSYLEANWALIREQIVTRTYKPKPVLRREIPKDNGGMRLLGIPTAVDRVIQQALVQVLTPVFEPTFSDFSYGFRPGRSAEDAVRLAQTYMSEGYKHVVDLDLSKFFDTVDHDILMGLIDKHMDDKDVRRLIYVYLKSGVMTNGSMAVTALGTPQGGPLSPLLSNVYLTPYDRELEKRGLRFVRYADDCNIFTKSKMSSYRVRDSAKSYLERKLKLKVNMEKTEARRAVGSTFLGFTFRTYGKRGKLGMTVPHEKKLKKLEDRIRLVTKRNRGVSIGMVIRDLNSILRGWVGYFARSAIKNYLERLMEWIRRRIRQYLWKQWKSGKNRKHRLRQLGVDEWKLKKWKLGSNSYWKMAGTMNYLIDKESIHGRYGLVDILGYYNKLHAQRMESDGIVLDVRYNSLFG

SEQ ID NO: 587 - protein, 434 aa, synthetic construct
MELIEVILSKENLNRAYKKVVANKGASGVDGVGVEELGDYIRENKDVIITSIRNRTYMPKPVRRVYIPKENGKQRPLGIPTVLDRTIQQAIAQPIWDIYEEIFSEYSYGFRPGRSCHDAIRQALYYLNDGYEWVVDIDIEQFFDKVNHDKLIQILGEQVNDSTTLNLIRKYLKAGVMEKGLEKATITGVPQGGPLSVVCSNIYLDKLDKELEKRGLRFTRYADDVLIFTKSEMAANRVMKSIRSWLERKLFLKVNGTKTKVVRPTRSKYLGFTFVKNSTEWKVRPTNEKKKKLKKKLSEYLKRGKAVARPLAVTIKRVNEIVRGWINYFRIGMMKQFMQELGEWLRHKIRVIVVKQWKRPKTIYRNLSYLNWKYKIGCKQEEIFKVANSRLGWYRRCGMSVVNFIISKDLLENRIKDGVGLLNPLSYYLVKVGI

SEQ ID NO: 588 - protein, 472 aa, synthetic construct
MDAERQQGRAYQLTFNFEGDAETLRHDQGGDDGIGTARPEEPQTSTASDPARALTERLMEEVTRPENLNRAYRKVKANKGAPGVDGMTIGDLRAWIAMHKEELIASLLDGSYRPQPVRGVQIPKPGGGVRQLGIPTVVDRLVQQAILQVLEPLLDPTFSPSSFGFRPGRGAHDALKQARQYVADGRVIVVDVDLEKFFDRVNHDILMARLARKVADRRLLGIIRRFLQAGLMQEGVCVARHEGTPQGGPLSPLLANLLLDDLDKELERRGHHFCRYADDCNIYVQSKAAGQRVLGSVTRFLEVVLRLRVNRDKSEVAYIEERKFLGYRLLSGGRLGIAPKSLERAKDRIRQITRRNRGVSVDRMTSELNSFLTGWVSYFRHAACKSHLTELDGWIRRKLRCVRLKHCKRSKTLADFLGSHGVAQHTAWVTALSGKGWWRLSGSPAAHQAMDQRWFASLGLINLAHRHTTLNR

SEQ ID NO: 589 - protein, 490 aa, synthetic construct
MSKAEYRQLTFAFADSPQGAGPAALTDVSVGKAWLALTAEVKEGNDSAAWTADTGRLLESATSAPNLAQALLNVARNKGAAGVDGRSVDEVVAAGPRLLPYLRRELLAGTYRPGDIRRVWIPKPGGGQRGLGIPNVVDRWVQQAVLQVLQPIFEPTFHASSHGFRPGRGAQTAIDEAKKYLAEGFCFTVDIDLSKFFDRVHHQRLLNRLAQQASDGRILKLVHRMLKAKVVLPDGTRITTEEGAPQGGPLSPILSNIVLDELDRELARRGLRFVRYADDFSVFVRSERAGRRVMDSIRKFIEGRLRLEVNEEKSSVSRPNDLTFLGFHLGKSPDGKVTVTPSQRTKERMDLRIRELTPRTWGQSVAACIEKANSYLRGWFGYFRLCTEEGVLSFGRFDAHIRRRIRAVIVHQKKRPRHLYRHLLDRGVSCGMAAKAAFQRRGLWHRSISFGMHKAYPNAWFADRLMSLKEEWQRLHPPEQVSYKQLLLFE

SEQ ID NO: 590 - protein, 471 aa, synthetic construct
MGAGVPEKKIEISEVDLHGGSRKLPRGRISGANFPGTEGQPDPRKPDLIEMMLERGNLLEALHRVESNRGAAGVDGLTVSQLRQYLRVHWAGIKEQLLKGEYQPRPVRRMDIPKAGGGTRMLGIPTVLDRLIQQALHQILSPLWEPWFSAHSYGFRPGRSAAQAIKTAQKHVQSGHRWVVDMDLEKFFDRVNHDVLMARVARRVKDQRVLKLIRRYLESGIMLGGMVEQRTEGTPQGGPLSPLLSNILLDDLDKELERRRHKFCRYADDCNVYVGSQRAGERVMKSLTQFLQAKLKLTVNPTKSAVDKPWKRKFLGFSLTAERGIRIRVATPSVKRLQDKLRAKFREGRGRNLRTFIEGLKPLLRGWANYFSVAETRQVFEKLDEWIRRKLRCMEWRKWKRPKTRLQRLTALGLDRERARLGAFNGRGPWWNAGASHMNAALPTSYFHKLGLILLTEEVDWQTALRTARSL

SEQ ID NO: 591 - protein, 464 aa, synthetic construct
MRTDDAEAYVSAASTGKGRRNRLGSGAGAEVRTAAVGRTKPEALRLMEAAVERSNMLCSYERVVKNKGAPGVDGLTVAAFKPWLQAHWPRVRQALLAGEYMPAAVRKVEIPKPQGGVRMLGIPTVLDRLIQQALHQVLQPLFEPEFSESSYGFRPGRNAHQAVKAARGYVAEGKRWTVDLDLEKFFDRVNHDVLMARVVRKVNDERVSKLIRRYLEAGLMEGGVVSARTEGTPQGGPLSPLLSNILLTDLDRELERRGHGFCRYADDCNIYVGSKRSGQRVMRAITAFLEQRLKLKVNAAKSAVARPWQRKFLGYSMTWHKKPKLKIAHQSRERFAEKVRRTLREARGKSLKRAVERLNPVLRGWVAYFRLTEVKGVLEELDGWLRRKLRALLWRRWKRNYTRAKNLMRRGLSERRAWLSATNGHGPWWNGGSSHMNEACPKSWFDRMGLVSLLDTQRRFSSVS

SEQ ID NO: 592 - protein, 467 aa, synthetic construct
MTTENRRKEEAKTEESGRNPVLPLNSAMVDETKREESLLPDNQRYIPIPKIEGVVSDYNIQEATKAVIRNKGAPGIDSITTEEIEGILQKEWPKIKQEILDGKYRPSPVRRVEIPKPDKNGVRKLGIPTVMDRIIQQAIYQELMFTFEAIFSENSYGFRRSRNAQQAVLKAQGYIQEGYEWVVDMDLEKFFDKVNHDILMAKVARRIKDKKILLLIRRYLQAGVLENGLVKPSEEGTPQGGPLSPLLSNIMLDDFDKELERRGLRFVRYADDCNIYVKTEIAGQRVMKSAIKYLTTRLKLKVNEEKSAVAHPWERKFLGFTFKKEEPGKIAIHESRIKRLKDKIRGLTKKMRDGNLTVSIRKFIMPIVRGWTNYFGIAEEQGIFASLDGWIRRKIRGIQWRQWKEPRTRFKKLKSLGIKEQTARNHGYSSKGPWKMARSHVMHKVFSNSTIESMGYIPMAKLVCARS

SEQ ID NO: 593 - protein, 409 aa, synthetic construct
MYEALRRVEGNKGAAGIDGMEVKDLRPYLKAHWQEIKGQLLEGTYKPKPVRRAEIPKPDGGVRFLGIPCVIDRLIQQSLLQVLTPIFDPGFSEHSYGFRPGRGAHQAVQKAKEYVGEGYTYVVDIDLEKFFDRVNHDALMARVARKVEDKRVLKLIRAYLNSGIMVDGVCIRTEEGTPQGGPLSPLLSNVMLDDLDKELEKRGHRFVRYADDCNIYVKSQRAGERVMGNVKRFLGERLKLKVNEAKSAVGKVNARKFLGFTLSSGKRSRIRIASKALERLKDRIRELTRRSWGIRMGERIRRLNVYLRGWIGYYRLAESLSVLNQLDGWIRRRLRVCLLKQWRKPKARWRNLVKLGVSEEWAYMISGSRKGCYRLSLTHQLNKALGLEYWKKQGLLSLAETYLNIRIAL

SEQ ID NO: 594 - protein, 439 aa, synthetic construct
MTEAVGEGVWEQVFERKNLLSALKRVEANGGAPGVDGMTVEALRPYLKAHWLEVRAALDWGSYRPSPVRRVEIGKPDGGVRLLGIPTVADRLIQQAIGQVLTPLFEPVFSPHSYGFRPGRRAHDAVEAAQGHIREGYTWVVDIDLEKFFDRVNHDKLMARVVRVVKDKRVLKLIRRYLQSGVMVNGVVMETEEGTPQGGPLSPLLANIMLDDLDKELERRGHRFVRYADDCNIYVRTERGGERVMNSVRGFLEKKLKLKVNEKKSAVARAGQRKFLGFSYFYRKGEVLIRVAEQAQQRLREKLRGLTRRTRSGRLEEIIQQLKEYMRGWMGYFRLADTPSVFAGLDQWLRRRLRQLLWKRWKRGTTRWRELVSLGVPRSLAGLGATGSSPWRMAATPVVPMALSTAFWDAQGLCSFTEYYHQLHWPRRTAGCGPACPVV

SEQ ID NO: 595 - protein, 484 aa, synthetic construct
MSSLRNEQGRQKLSDRETGEPTQQVKPEGEVQSAEPFPARDDGKSDESDGLSLSKPVWEAVFARANLFAALKRVESNKGAAGVDGMTVKELPAYLKAHWLEVRDALESGKYRPSPVRRVEIPKPDGGVRQLGILTVLDRLIQQAIAQVLTPMFEMAFSPNSYGFRPGRSAHQAVERSQEYIREGYDWVVDIDLEKFFDRVNHDMLMARVARVVKDKRVLKLIRAYLESGVMLNGVVMDTEEGTPQGGPLSPLLSNIMLTDLDRELEERGQKFVRYADDCNLYVTPALAGGARETERAGERVLESVKQYLEKKLKLKVNPKKSKVERATRAKFLGFSFWKRKGEVFIRLAKRTKERFAEKIRYLTKRTRSGKMEDIVSEVNRYTRGWIGYFRLATTPSVYQEMDEWIRRRLRQIQWKRWKRGRTRYRELVRLGVPPKRAALGAVGTSPWRMSHSPIIHEALSNAFWRNTGLESITERYNQFRYSH

SEQ ID NO: 596 - protein, 466 aa, synthetic construct
MKSGGEWRQQLLPFEAEAPTGGAGQNSAGPAGVSRAPWRQPDPASARPTLLREIVRERVLEAAWKQVRRNRGAPGIDGMRVGDFEEWIGVHGDQVRAEILAGTYEPQPVRRVEIPKPGGGVRLLGVPTVLDRVIQQALVIVLTPILDPTFSESSYGFRPGRSAHGAVAAARRHIADGYRWVVDLDLSKFFDRVNHDVLVDRLWKRLGDGPLLSLIRRYLKAGVLIEGVVVESVEGTPQGGPLSPLLSNVLLDEWDRELERRGHRFVRYADDCNIYVRSRRAGERVLASCRDFLERRLRLKVNEEKSAVARPWARQFLGYSVTNGKKPKQRLAKRSVVRLKERVRAITSRSRGISLEQMLRELSRYLRGWSGYFRRIETPSVLEQLDSWIRRRVRSFLLKQWKPGRGRRRAIQKLGVDDGWRLSASRKGPWRLSRGKVISAALPNATLEQRGLVNLKQEWKRLAELF

SEQ ID NO: 597 - protein, 415 aa, synthetic construct
MTTECTMEAMFNWLNLEEALEAVKRNKGAAGIDGKSIAETEQHIEEYWTQIEAKLMAGQYIPSQVKGVKIPKPNGEKRLLGIPTVQDRVIQQAMNQQLSKAFDREFSINSYGFRPYMSAQQAVKQAQLYVQQGKHWVVDIDISAFFDEVNHDILLHQLSQKVTDKRVQGLIRKYLKTGIMIEGKLERRGKGMPQGSPLSPLLANIYLDRLDKELEKRGLSFCRYADDTSLYVSSERSAKRVLESLTQWIEKHLKLNVNQSKSGTGRPWESQFLGFRIGKDGEIGIAPKSIERYKEKVRKLWDARQSLTSKQLIEQWQKYSIGWWNYFKLATKRWTIRCWVGWTRRHIRKCFWQRWHNKKGRLNALRRLGVSEYLQKTASSSRGAWRIASSPALHKALSNATLRRYGLDVPPLSAA

SEQ ID NO: 598 - protein, 422 aa, synthetic construct
MGKQRSMTPHQPSLLMLRIVERNNLQRALKQVQRKKGAPGVDGMTVEELPDYLRAHWPQLREQLVGGTYRPKPVKRVLIPKANGKQRKLGIPTVVDRFVQQAIAQVLSEYWETKFHPDSYGFRPQRSAHQAIRRVQAYTRAGYRTAVDLDLESFFDEVNHDRLMRALHRTHPDTDVLQLVNRYLKAPVSTCDGRLSSEKGVPQGGPLSPLLANIVLNEMDWELERRQLRFARYADDCQILVGSHQAGQGVMASLTRFIEKTLRLKVNREKSAVADVHERTFLGFVLTRRDQRIRVSGKVLEKLKATVRTVTRRTRGHSFRKILEELRRSLLGWKAYFDASEVLSPLKELDKWIRRKLRCYLWKQWGRAGYRRLRELGVSRQLAWNTAKSAHGPWRISHSPALYHALPTSYFRSLGLPELAAR

SEQ ID NO: 599 - protein, 456 aa, synthetic construct
MSLKHAMHQMLGQPGRANVGEGEPQLDVVSDEASLAGHTQEGSGQEDLLQQILLRENLVKAWKHVKANKGSAGIDGLTIEQTTEYLKTHWSKIREELLSGQYRPQAVRCVEIPKPGSGTRELGIPTVVDRLIQQAMLQVLQPLIDPTFSNFSYGFRPARSAHNAVLKAKRYVEEGYQIVVDIDLEKFFDRINHDILIDRLSKKIPDKSVLGLIRRYLQAGTMVNGVVMEREEGTPQGGPLSALLANVLLDEVDKALERRGHKFARYADDCNVYVHSQRAGERVLQSLRCIYAKLHLKVNEAKTTVGTVFGRKFLGYCLRRWSGDTVKIAVATKALETFKQRIRLITCRVGGRSMIQVAERLRAYLPGWKSYFRLAQTPTTFKDLDSWLRHRLRAIQLKHWRRGSTTYRELRKLGATHEMASLMAGGAGHWWRHSKFNLNMVLTVAYFNNLGVPWLT

SEQ ID NO: 600 - protein, 458 aa, synthetic construct
MKNGEEPSPDSTRRLSRPGQAAAAPSEKPSPSLFPERMMEVIVDSANMQRAWDQVRGNRGAPGPDGVTLTQFPEWFRPQWAVIRQQLLDRTYEPSPVRRKTIDKPDGGQRQLGIPNVLDRLIQQAIQQVLTPVFDPGFSDSSHGFRPNRSAHGAAKQVERTIRRGRRFVVDMDLSKFFDRVQHDVLMSRVARKVRDRRLLKLIGRYLRAGVMVEGVLQSSPEGTPQGGPLSPLLANILLDDMDKELERRGLPFVRYADDFVIFTKTRRAAERVFNGVNRYLTKVLRLVVNLEKSRILPADGVEFLGFVFRGVTGTIHVSEKSVQKCKRWIRELTGRSRGISMTQRLGELRRYLQGWAGYFALAKQMRLFENLDQWIRRRLRMCLWKCWRFVRTRVQNLLALGVPRRQAFRHAKSRQGPWHMAKTIASGVGMTNAWLHDQGLVSLKSLWVKRAPLRRTA

SEQ ID NO: 601 - protein, 422 aa, synthetic construct
MKKWYSLIDKVYRLDNLKRAYRAVRANKGAPGVDGETVEAFGQNLEERLHQLHHELKTGTYEPQPVLRVEIPKADGSKLPLGIPTVKDRVVQQALLNIMQPIFEPDFHPSSYGYRPGRSCHQAVAKSERFMNKYGLEYVVDMDLSKCFDRLDHELILEGVNRKVSDGSVLRLIKKFLTAGVMKNGAWEETDIGSPQGGVFSPLIANIYLDRFDQDMKRRGIRIVRYADDILIFARTHREARKYQKLATEILESELKLVVNKEKTHLTSVKKGVTYLGFIIKSKFVSIHPKKIKSFKDRIRQLTPRNHGINVEEMVKRLNPVLRGWANYFRVANCKMLFLQLMEWIRRRLRMKQMKEWKSWKPLHKALRRRGYKGEFRKISVTRWCNSASPLVNMALPNSWFNEIGLINLASYNVGILHHFWE

SEQ ID NO: 602 - protein, 428 aa, synthetic construct
MGDTMTKRKHHSLYGQILQRLDTAFAKVKANRGAAGIDGESIAEFEQDLEANLAQLKRDLKEKTYAPQPVRRVYIPKASGGQRPLGIPTVRDRVVQQALRLVLEPVFEPLFCDSSYGFRPGRSAHQALDRVSGHLREGYKWVVDCDLKSYFDTIPQEALIDRVAEEVADGTVLKLIRSFLQAGVMSEGQLQRTIAGTPQGGVISPLLANIYLHGFDQLMEDRGLRLTRYADDFVILCRTQRAAERVMGNVQSYLEGQLGLTVNREKSKVVHLSEGFVFLGYEFGTWGRRPGPKAILRFKQRIRELTRRNQTIPVDKMVREQLNPYLQGWAGYFGYGQVRQRFLDYDKWIRRRLRMVQLRSWRHMKGLHRAMRQKGWKGPLPAVYVNMRRWRSSVHSLVNYALGPDWIRGLGLVSLVDFHRPTMVTVTR

SEQ ID NO: 603 - protein, 390 aa, synthetic construct
MGQMLEAIADPANLAAAWAKVRANAGAAGVDGQSIAAFDADSEHQLVRLRRRLLSAERYVPPPVLRVEIPKPDGRMRPLGIPTVADRVVQQATRQVIEPHFEAEFLPCSFGYRPGRSAQRAAVWWVKEAIRRGDRWVAEFDVEGFFDHLSHARLLRQVAKKVDDPEVIGLVRRWLRAGVFSAEGLVPSVAGTPQGGVISPLLANIYLHRLDVKVRAAGFRLIRYADDFVILADRRWKVKAADRLVRSILSDMGLSVSEAKSGVVRVRDGFEFLGFTIHGRFLRPRPRALASFKDRVRSRTRRQAPVSMSQMIDQLNPLLRGWGTYYAIGDVVSLFEDLDKWIRMRLRSKARKRFKSKGGPDGQKWPNKAFDDLGLVRLEHLARTGKLSPV

SEQ ID NO: 604 - protein, 386 aa, synthetic construct
MKKRKWYSLVDKIWKFSNLEAAFSKVKENRGAAGIDRVSIGQFERQKQQNLLEIQRLLRSKRYEAIPVRRVEIPKSDGRYRPLGIPTVRDRVVQQATFAVMSPIFETKFLDCSYGFRKGRNTHQAIAKMEQYRNEGCEWVVEADIESFFDTVNHELLIDQVAEEISDGSVLKLIRSWLTAGAFKGTEVIETSVGTPQGGVISPLLANIYLHPFDVQMTALGFKLVRYADDFVIMCRSEDEAERAMEAATRILSGIKLRVKAAKTRIVQLSKDDGIEFLGFTIFKEHKVPRTRAVENFKSRIRLITRRQRPATLQEIIKELNPVVRGWGNYFKIANVNWLYKGLDSWMRMRLRSFLEKKKSYEANKRLENKHFSEAGLTTLSSLIGY

SEQ ID NO: 605 - protein, 460 aa, synthetic construct
MASPATECPAGHSAVATKSSAGHRVGFFAARRAAKSQGRRQGQDGQQRSPKPSSGNARAEGPRRVKRKVSSLIDQVYRWENLYRAWRRIRRNKGVHGLDRVTIRNFEADWEKHLREIQRMLMEQRYVPTPVRRVYIPKPADPTKRRPLGIPIVADRIVQQAIFQVVDPLFDSTMSDRSFGYRKGRKAHDAVAALISDAKQGYRFVLDADIASFFDEIDHDVVMSCVRARIADGRVLDLFEAFLKAGVSEDGEVSVPDKGVPQGGVISPWLSNLVLDHLDKAIEKEGWRHARYADDFVVLCRSREEAQRALTVVKEVLETLKLSLHETKTRLTDCEQGFEFLGFHFRHYRLGIRESSIERFKDRVRALTRRWQGRNVDAVLADLNPVLRGWARYFGVAEVSLTFRYLDSWIRMRLRGFKYKRRCYHDNWRLPSKRLKRWGLLSLQQCRPQLRLSYARAVGP

SEQ ID NO: 606 - protein, 451 aa, synthetic construct
MQESGSAKTMTNDETTRPTAVAGLDQPKQAGNIRDRWGWIEHSVWTERMLTRLEASEPTTVWYGLWDKVHSERNLEAAFWAVWRNRGAPGVDGQTVRQFEAQEQAQLAKLREELRSKRYHRQPARRTWIAKPGTLEKRPLGIPAVRDRTVEAALKQVLEPIFEQDFAEHSYGFRPGRGCREAVKRVEALLGQGRVWCVDLDFKSYFDTIPHERLLGLVQQRVVDGSVLALLAQGLKAGVLETLKGWQPTEVGTPQGAVISPLLANLYLNPLDHAMAERGWEMVRYADDLVVLCQSREEAEQALAYLRQWSGEAGLSVHPTKTRIVNAHSEGFDFLGWHFRGGKKWPRKKSLQKLRDKLRPLTRRTNGRSLEEIITKTNRILRGWHGYFRESHPTGLSGPDGWVRRRLRAMLRKREKRPGYGLSEADSRRWPNRWFGVQGLFSLEHGSCAYG

SEQ ID NO: 607 - protein, 418 aa, synthetic construct
MKAEGTGQKVHSLIDKVYHRINLDMAWESVRANGGSGGIDKIAIPAFQAVAEVELERLHEELKQGTYRPMPVRRILIPKKGKPGEKRPLGIPTIRDRVCQQALKNRLEPIFEPLFSECSFGYRPGRSTHQAMRKMYREILDGYEWIVDADLRDFFGTVHHEPLIDRIAEQVSDGRILKLVRQMLEAGYMEDGKKYATPSGTPQGSVVSPLFSNIYLNRFDHEMTSKGYRLTRFADDWVVLCKTRAEAARAIRDARTILESLGLTLHPEKTKITHIKWGFEFLGYKLKRGKGLSLPQEKVKKQPKTNIYAFPKAKSVQSFMDTIRTRTHRRIPLTVFQLIDSINPVIRGWGNYFRKAHVRKLFNRLQRWIVRRIWSHRYKRWRNAGWKKLPESILYSKYNLVNLLSLIPDLNLRTAPKG

SEQ ID NO: 608 - protein, 431 aa, synthetic construct
MEVTRRDRVKAGLLENILSRDNMLAALKRVKANKGSHGVDGMKVDELPAYLKAAWQTIRQSLLDGTYVPQPVRRVEMPKPDGGVRLLGIPTVLDRLIQQAIAQILSDIFEPGFSCHSYGFRPGKGAHDAIRAARDYIRAGYDYVVDIDLEKFFDRVNHDKLMARVARKVDDKRVLKLIRRYLTSGVLVNGVRVASEEGTPQGGPLSPLLANILLDDLDKELERRGLKFCRYADDCNIYVKSKRAGERVMASIGRFIRERLSLKINENKSAVDRPAARKFLGFSFYRKKDDVGIRIHPKSVKRFKEKIRSITNRNWSMSMDERFRRLHSLCAGWIRYFGLADAKTHMRELDEWVRRRIRACFWKQWKRIKTRHDNLVKLGVDSMKAWEWANTRKKYWRIAGSWVLATTLTNQVLEDMGFRNLSKLYSEMTYS

SEQ ID NO: 609 - protein, 471 aa, synthetic construct
MKPIIIEDGRTIVLARGYFSPHRYGTGRFGGFNQIQDGLLADPELLRQVVSTIMCPEERTLIPENDFYPECWEPEKYEADGPLGSIDAFFTTFRRIARHDMYCSTVEQGEWVMAYGTEQLTYRRMNRPLDDKHFRLKSIRLPDESDRALVKKCFEFRVAPAITHCLIVGRAFMREDKPMYKHFKKRTTSKVRDIWAPEPEVKAALRHLLHPLNSAYDMKRSGSPQYAYTKDRNILMNAEPHARNKWMLNADITGFFDHCDWDLVKGYMRFLMKDISAEDKAVLKVMLINPATGGLYQGSPVSGALSNAILRPAAKYMKAFFQKEGRTLTVYADDITVSQGAAIDSTVRKNIVGKIRHAFEKFDLPFDLKPSKTRVSRNNGRKVTGIRINHLDQCTIPLPKYRLLRSMLHRMSSGGDVTMAKSQLKGYLEFARFNDRSGKIDRLIDKYRDVLVDKGMIRPILDPQPVEIPEE

SEQ ID NO: 610 - protein, 541 aa, synthetic construct
MDDKNKLYLINDGKTIVTRFGAITPFHQSKKYEDTLKIPEKFLEDPESLRQLIGFKLFEDRTKIINKNDFYMRDPQVYKKGKQTTLISFLQAAHKVMRLHYENYRVEIFSKYVVVLNCPTIKFTGTQVKETCHIDSKTANGERKPLLISACYKVEDDDERTKIFDLLTLKYAPAIIDVYITTLRLEAAGTKLYQYYKVPTSTKVREIWAPEDSLKDSMRHLLLPLTSAYDMKKKNSTQYAYIKERSIVNNAEVHKDNKYIAKFDIKGFFDFCNWDLSWKYLKFLFPKDKYGKKAELYDDVKNTLKRVIINEQTGGLFQGNPVSGVISNAILRPFSNYILNILEKQADVKNGVFPSINEKNAETESIDPEGNITTKFDGKEYKSFSKYTDPSNEDLRYAVSVYADDITVSSNYPIDWNEAKRISGILRYSFEHLELPFKLNLKKTSIARNNGRKITGVRINHNDVMVVSRVKYMLLKSMCHRIKHGKKISMPKNVFQGNLAYARFVDHSGKIETLIAKYHANLVEFGINLKLPGELADSYVE

SEQ ID NO: 611 - protein, 324 aa, synthetic construct
MLLEKLQIQSNQSLERLERFATSASKRYKVFQIPKRSGGFRIIEQPSKEIKAIQRWLIEALFDEFPIHHSATAYIRGKNIRSNAEVHAESNFTLKLDFENFFPSFTERHLIKFLRNYPLIEKKQINDRDINFISRICLRNGRLTIGAPSSPTITNAMMYQFDTLMSARCAEDNFSYTRYADDVFVSSRSYINVGEIILFVENLLSKYEYASLRLNKDKTAILSRKGRRSITGCVITPQRGISIGRKLKKSIKHKIYESINGRLSSLEATKLMGYLGFLKDIEPNYFESLKKKYGADAIKTITSGNYDEIKLVPLILDDLDDTPF

SEQ ID NO: 612 - protein, 314 aa, synthetic construct
MVSDILDKISKDLLCSRDVLLRMYHRAPHAYKFYDIPKKNGGVRRIAQPAREVKKVQRWVVDNILSSVKPSAFSTAYLEGSSIKKNACMHLHNAYIAKFDFKNFFYSIKFSDVKRTLEVKYGMEEGQSKFIARLCSVSIEGNLCLSIGAPSSPSLSNIVMYDFDEYLAGRCLSLDIVYTRYADDMTFSSNEKGVCFQIEGLIVDALRNTESPELALNHKKTNFISKKYRRTVTGLTLTNDKKSRISLGRDRKRLIKALVHRSIINKLDKEELEKLQGLLGFAYHNEFSFYNSLCDKYGFGVVSNLMKQKSPTIT

SEQ ID NO: 613 - protein, 310 aa, synthetic construct
MELINKLATKLNKSESEVIRFLASAPLKYKVYTIPKRTSGHRVIAQPSRELKEYQRAFISLYRLNIHDAAMAYRERLSIKDNAKFHCKNRYLLKIDLESFFNSITSELFWTIWQQHYEMPNNDEKVLMERLLFWSPGKSSTGKLVLSIGAPSSPLLSNFFMYQFDELVTRHCEKLEIKYTRYADDLTFSTNAKNVLFDMPRYISDTLTTLFGSALIINRRKTAFSSRAHNRHVTGITIDNESDLSLGREKKRYIKHLVHQYRLNKLDKENVFHLKGLLAFAKHIEPKFITSLETKYSAEVITQIFEEQHG

SEQ ID NO: 614 - protein, 308 aa, synthetic construct
MLVINDLGKRLNQSDLAVKAFLENAPRKYKVYRIPKRTTGFRIIAQPAKELKAYQRAFIELFHFPVHECATAYQEGKSIRDNALVHARNPYLLKTDLEDFFNSLTPDIFWQCIEHCSADAPEFLKEERRYVERLLFWQPAKRSKRLILSVGAPSSPVISNFCLLELDRRISEECRHLEVDYTRYADDLTFSTRIPGVLSAIPALIDSLLKQLYNSKLRLNRGKTLFSSRAHNRHVTGVTLNNEGELSLGRERKRFIKHLIHQYDTLDKEDKAYLVGLLAFASHIEPEFIIRMNAKYTTELMDRIRRQQ

SEQ ID NO: 615 - protein, 313 aa, synthetic construct
VVGLLASKLDDKPSPKVVEAFLRDAARKYCVFKIPKRTQGFRVIAQPSRELQRYQRTFLDNFSLPVHSAAMAYRKGQSIKENAEAHLKQKFLLRMDLENFFNSIKPALFCSVWQSFADLPSLDETDVGLINQLLFWCPSQRRGGKLVLSVGAPTSPMVSNFCLYHFDQALTEFCDTERIVYTRYADDLTFSTNMPNVLEKIPKQVQKLLKEKLTGKNYQLRVNRIKTVFSSKRYNRHVTGITLASTGKLSIGRERKRYIKHLVHQFKMGELEKVEDIAHLKGLWAFAKHIEPEFCRALERKYGLVTMQRIKEA

SEQ ID NO: 616 - protein, 319 aa, synthetic construct
MWRYCTDEEAIRSFHLTDGLQCKEGKEIQTLFAVSNHAEVHYHTAYIPKKKGGRRKLLVPDALLGRIQKNILQNVLAERKVSPYAKAYIKGMGIVENALPHSHAEILLKLDIEDFFENITYLMVYQKAFPEKYFPPAIRTMLAHLCCYNDYLPQGAVTSPMISNLVMYSFDEYIGKWCGERKIAYTRYSDDMTFSGDFEVKEVKHKVRSFLGKMGFLLNEEKTRVLKQYQRQIVTGIVVNEGTNISKSYKRSIRQEIYYCEKYGAKSHLQRRNLSEKEEVPYLKQLLGKVNYVLQINPDDKNFQEAKKKIKEMLLKIKG

SEQ ID NO: 617 - protein, 333 aa, synthetic construct
MISTGLWKYFTKEHHKEFVLSLGLLNDTGWPIEKQLRCLYTVSNHTERHYTRLTVPKRDGTIRELLSPDPLLKKIQRNILHNVLEELPVSPHATAYRRGAGILGNAFPHQGRKQVVKLDIRDFYGSITFLMVHRAFPRIYYPPSVATLLTHLCCYQDCLPQGAPTSPTISNLVMKPFDDHMGTWCKERGIIYTRYCDDMTFSGDFDAEPLIRKVRSFLLSMGFELNERKTQILCGGKRQSVTGIVVNEKPQVSRVYRDKLRQELYYCQKHGVASHLLWLNDRQYLPPEPEQIERYLRSLIGRINYVLQVDPLNLYFAEARTTIGNMIKDMESG

SEQ ID NO: 618 - protein, 321 aa, synthetic construct
MASPSQTSKLRMLGLPIFDDLESFAQVTRLSKKFLYLHSSFSDQHYKKYFIPKKSGGQREISQPSKAHKAIQGWILRNILDLLQVSQASKGFAKKQTTADNAIPHIGANAILSLDLEDFFPSITANKVYSIFHSLGYSKPISIMLTSICTCGGKLPQGSPCSPKLANLVCIRLDNRVQGYVGARGVTYTRYADDLTFSAAHPGKLMHIFNFIRRIITEEGFSLNESKTRLAGTRLRKKVTGLVVTEGAVGVGRIKYRELRSKVFNLTKTQDIFYDQKEINEIYGWLGYLKSIDSKRYEKLVSQIETLKKNHKETSLDYLLV

SEQ ID NO: 619 - protein, 300 aa, synthetic construct
MNYSNISTLVKQMLLKIHDDIYKKINQNYIDVFLCGGVSSSRNISVRDIIRKELEKKKGIRILYPEELFMEILNKDKESDLLSLEKFLADNCDIICIICESAGSLVELGAFTNNDATVGKVIAVIEEKRKKDKSFIMLGPIKVIERINNRNVFFYNKNKLEDLSNELSREIKLRRFRGVIKIETEQNKPLNTILGLYYILPLMLYFFKSLEYIELTNYLKYLFKIKGYDDSDFEWLFRSSLKLLYKDRYIYKTTVKEKTFYSLTQKGYNNIYNVLYSIDINNRTLLYDSIRLGIIKSAYY

SEQ ID NO: 620 - protein, 319 aa, synthetic construct
MAKTEIIKLNMLGLPVIQSLDDFSAVTHISKYTIYQLSYHSEKYYKTYDITKKSGGKRTICQPSRKLKGLQSWILVTILNKIQVSQSCKGFRKDSSTLDNAIPHIGANTILNLDLKDFFPTVISKQVFNIFKTIGYNNLISTVFTNICTFEGKLPQGSPSSPMLANLSAWTLDLRIQGYVGKRGINYTRYADDLSFSGLNPSKVVKIIPMIKTIIDSENFVVNHKKTRVASSARAKTVTGLVINEDSVGIGKQKYKDLRAKIHHLTLPKEQKNEELLYHVSGWISYLNSVDKLRFNKAKKYISELTKKHPKTLIARLDK

SEQ ID NO: 621 - protein, 322 aa, synthetic construct
MAKNENIRLNMLGLPIIQTIDDFSQITHLSKYTLYQLSARSDFHYKKFPSKKKSGGTRTICQPSKNLKGLQAWILVNILNKLKVSDSCKGFEKGSSTADNARPHINANCMLTIDLSDFFGTVTDIQVYNVFKSIGYNKLISTMLTNICTCDNSLPQGSPCSPKLANLITWKLDKRIQGFVGKRGITYTRYADDLSFSGLHPANTVQILPVVKSIIEDEGFLINPKKTRVAGANRAKRITGLVISNNRFGVGTKKYKMVRSKIYHLTKLSEQKNTILLNEVTGWISYLNSVDKPRFRKALKYVEELKKKHPKTLVDKITGYNN

SEQ ID NO: 622 - protein, 355 aa, synthetic construct
MNNIKTKTNYFLLNTLGLPIIDSLDSLSDTLAISKNMIYLLSKCNYNYYVKTHIPKKDGTKREILIPNYSMKMTQRWILQNILYKIRVSDNAKGYKKGIKAPLVENAMMHHEQLYCLILDVENFFPSIGVKRICNLFERVGYNSLISYILARICTYKDYLPQGAVTSPYLANLVCFKLDRRIDAYCCKREISYTRYCDDLIFSSDNLDSLKKAYKMFEVILCNEGFKLNRRKTRFLTPNTLKQILGITINDELIKAPKIMKRKVKALIFKSIVNKDYRKNDVIRGYIAYIKSIENNYQNKIEKYVKRLHNKDFIRGDLEVVKAYNENKLYSNFPDLAFSKAAALFLENPELEELM

SEQ ID NO: 623 - protein, 338 aa, synthetic construct
MLYLEKLVESMEGKYETKYISLCAAYSEQLISKGMPVIFDGQHLAKLLGINFSILSYYVYSTNKFYQEFEIDKKSGGSRKIEAPSRNLKKIQRWILDNILNKFELNENTYGFRKGYNIVDNAKNHTNKFLVYNIDIKDFFPSITREDVFYIFYNKGYTYEVSYIFSKLLTYKNHLPHGAPTSPYIANLRCEKMDYSLNVYTKRINADYSRYADDITISTNNAHDFIDNIKIIKKIITNNGFVLNEKKERIQYYKSMQEVTGLIVNNGVKVRRRFKKDLEKEIYYCLKYGVSSHLTRTEKNHLSFYKEYLYGKVNFIKMVEPELAEFYLKQLSEINWYS

SEQ ID NO: 624 - protein, 471 aa, synthetic construct
MATDTLAWADVDAAGGIRAWVDAEVARQGLADPGATQSTSEAKSRGVGTPTASPAGRGSSPVEKMSDAELKLYKARRDEERRVRRELYRRAWQAYRRSHIVHLGPGVFWHDTADVDRFDADDPERKRQDNALPALADVEALAKALGLTIARLRWLAYHRDVDTGTHYHRWLVPKRDGTPRLISAPKPELKAAQRWIMREVTEHLPMHGAAHGFIPGRSIASNAVVHAGARVVVKLDIRGFYPTVTMRRVKGLLRRAGLGEQVATVMALLATESPREKVETHGKTHYVALGPRSLPQGAPTSPSITNALCLRLDCRLSGLARKLDCRYTRYADDLTFSWHGAARAQIGSLLRAVGKIVRAEGFEVHMKKTRVMRAGARQKVTGLIVNQAPPDRPAARVPRDTQRKLRAAIRNRELGRPGKGETLDQLKGMAAFVMMTDPARGRAFMERIERLIAAGTQGADGAPGTPERGSP

SEQ ID NO: 625 - protein, 511 aa, synthetic construct
MSDQTSTTEPAPSADTPSALASADGQPSGAEAWAEIDEAGGIRAWVQAELTRRGLIDDADTTSMSDKERKRYRARRDEERRVRRLLEARAWAAYRQAHLVHVGLGVFWHDTADYDRYDIAEPEVRRQDNDLPALADVQALARALALPIPRLRWLVYHREVDSGTHYHRWTVPKRSGGERLISAPKPTLKRAQTWIARNITEHLPVHGAAHGFLPGRSTATNAAAHAGAAVVVKLDLRDFYPSITLPRVKGVFRKAGYGEQVATALALLCTESPREEMVVHGRRYHVAVGSRSLPQGAPTSPSITNALSLKLDCRLDGLARKLGFRYTRYADDLTFSWHQDEDAPVGRLIRAVERITAEEGFAVHEKKTRIMRAGRRQKVTGLVVNRLPRRPSGQASDESRGQPSEEPLGHGASGQEPGVGAPRARVPRKLVRHLRAAIHNRAQGKPGQGETLAQLRGWAAYVHMTDPARGRAFLDQLDRLASAGVGDETGAGAGDEASAGTSDLPATGDKS

SEQ ID NO: 626 - protein, 633 aa, synthetic construct
MSDQARRAAIQARIAQSSRDDVILDEMIRLGFWDAGGDPHAAELTEIMARSKEIRSELSQLNSQNARYLDPEAALKAMHAERKAAALARRKETKLARARARQARAEAWAQRSRDAVWHLGPGVSAALEQGEGKSAPRSLAPGLPALATPAAVASAMGVSTGELRFLAYARPMSRVSHYKRFEITKKSGGKRVISAPMPRLKYAQYWLLDAVLSKLPLHPAAHGFVPGRSILTNARPHVGRDVVANMDLRDFFPTLDDRRVKGLFESLGYGEDVAQVLALIATEPVTDEIEIDGRVTHLARSPRRRLPQGAPCSPAITNLICRRLDARLAGLAAKLGFAYTRYADDLTFSASGEDAKKVGALLRAAQEIVRAEGFEPHPDKTRVMRRGARQEVTGLVVNDRLGAPREAVRRARAALHRAERQGVAGLKFGSGRDALAGLVGFAQFVAMIDPRQGASLVARARALRRGADEGATSMLSRAGLARAGLGAAALRKAAAAGAPPEAMRWRPAERPAPTLDPVLVEAERAAAAKARREAEKEGSRQAKSARSGTSVPPVRGAGTGASGGGGPARAVWGRTATPELGESSAEWARPATPRRSFWSLAVTGWLILMALAVLPFAPWLTALLGYLVYRRLR

SEQ ID NO: 627 - protein, 264 aa, synthetic construct
MPYNYDLCFKTPQNRWIFVPTSECRDNGYEYVKLIRRKWTLPNFYYHLKAGGHIAALKLHEGNNYFAKIDIKSFFPSISKAKVIRALKDIGINYKLAELIASWSTVKSKENSTKYIVPYGFVQSQIIASLCLDKSAIGSFIKNKLPTDVKVSVYVDDIILSSNNPSALQDIYNQIIATFDKTGFTVNTEKSHEVLDQTTTFNIVMNAEDMQITEDRFTDFESAITPLNIKRSEAIINYVSSVCSIQSETLKEQLKSMIDNSKCA

SEQ ID NO: 628 - protein, 296 aa, synthetic construct
MQWLRYYELSPGSQKYIYIPTDESRLIGSEIINVLKYRWKKPEYFYHFRQGGHLSAIKVHFYDEEPCQFSVFDLSGYYRQITRSKLVRVLKKYVGYEQALDWAQKSTVLQNGDLGRSIPLGFVQSGFLASLVLDNSCLGKTLREINKTPNIRISVFVDDIVISSQDHELLSFYSQKIKEASKKSNLTLQHRKTFCNIDSINIFNLSYKSGSEIDFCADRVNNFKEILVKNCDRKFVVFGVIMYMLKVNAKRTLSILDSIVQEKGISKTGILGKFYYEHKIKENQNIIETLRKVCFQ

SEQ ID NO: 629 - protein, 256 aa, synthetic construct
MSNYTPKWIHRITLENGKWIFVPSQSSRLSGKAIVKKVKLEWAPPKYFYHLRRGGHIAALNAHLENKYFSRLDIKNFFGSITASRITRTLKPYFGYNLSRDIAKQSTVRIPGLLERKLMLPFGFIQSAILASICLDKSSLGIFLKRIKRDKSLSLSVYMDDILISSNDQQRLIEVTAELKSYFSKSHWVSNTGKEVIAADSMTAFNIDMLQYEMRVSEEKMKQFAFNFSETENINKKKGIYSYVKTVNDGQLIDLV

SEQ ID NO: 630 - protein, 251 aa, synthetic construct
VTQKWTHRYQLKPGRWVFAPTDEAKKCGAHIKRSVASRWKAPNFYYHLRNGGHVAAVRSHELSRFFFRADLDDFFGRVNRSRVTRCLKPWFSYAEAREMASESVVKRPGETAFVLPYGFVQSPILASLALDKSKLGSLLRSLDGGRDFTVSVYVDDIIISGDDEAQLKEVASRLERVASEALFPLSSGKTQGPASGVTVFNIELSHRMLRITDDRLASLRLDYQATASEHCKAGIVSYVYSVNPDQVAQVT

SEQ ID NO: 631 - protein, 231 aa, synthetic construct
MQWSSYYELTPGSKKYIYIPTEQSRELGKLIIETIRKRWTPPAYFFHLRKGGHLAAIKHHIDKSCKPRKFSVFDISGYFGQVTENKLRRVLKNFVSFKEASQWAYDSTVRKPSEDRRTLPYGFLQSGDLASLVLDRSYLGCEFRKIHQNPNIKLSVFVDDIIASSSDPILLEEASNSIINAAKLSNFKFNQDKIRCNVDEIEIFNIHCSQDFGLSFSQEKLKKNSTNSKKL

SEQ ID NO: 632 - protein, 251 aa, synthetic construct
MPINFKFAYECKGKRIFVPNDECVRRGEALIKYCSQAVDFPSYFYHYRAGGHVAALHRHLEHRFFFRIDIENFFYSISRNRVSAVLHHIGFRKARPYAEWSCVKNPFGAPAYSLPIGFVQSPMLASLAILRSPVAAAIERAAAAGAFVSVYFDDFIGSAVDREPLEKAFQDILHSCQEANLISNQLKLAKPSEHILAFNCDLSHGIAEVAEARVAKFFKAPRSQWAEAAFREYCNRVARNNHKSEGRRFLR

SEQ ID NO: 633 - protein, 255 aa, synthetic construct
VKTYRKKIDLGEGKFAYEQTAESYKYGKMIIKKIKQKWAPPSYHFHYQKGGHLAALNAHRNSNCFSKIDLSKFYYKITKNKIIRNLKKIGFTFQEADEIAALSTIPHNGYFVLPFGFVQSSIIASLVLSKSAIGSVFKNTPDAIRLSVYVDDILVSALDKQVLVESFSQQICDAAEKSNFAINTAKTVLAQTDLEIFNIDICRNKWKISDNRMSEFMVEMSLTEDDNRAEAMIKYVSNVNLAQSESMRRMRDMRG

SEQ ID NO: 634 - protein, 257 aa, synthetic construct
VDRWINRFKLNHSIWVFVPSDDSRQVGRKIKTAIEKNYKFPEFYFHLKNGSHIKALNSHMQHEYFASLDIENFFGNINKSRITRVLKIFFSYDEAREYANWSVVRNPDENSNESILPFGFVQSPALASLCLDKSKLGRVLRNINNLDVSVSVYMDDIILSSNDKALLYKSLKKVEEASEKSKFPLNKDKKNNPSNKVTVFNIDLSRGKLQINNKRIKEFQSAYEKTGLDEEKKGILNYIKTINPIQEKQFIDKINKI

SEQ ID NO: 635 - protein, 251 aa, synthetic construct
MFSKRWDNKFLLKKDLWVYVPSDEMYAFGKKIHTTLSMRWKRPANYYHLLAGGHVAALKYHQSDSYFAKFDIKNFFNSISKTRITRSIKSLVGYSAAREIATVSTVPVSHQQSFSHCLPYGFVQSPILASICLSESYLGRLIERKCKSCKISVYMDDIVISGNSESDVDALLNELLSAASKSHFEVNPSKVRLTSHTLESFNIELSQQTLNITADRLDAFKQEILNTENQAKIDAIIGYVKTVNVSQAGSL

SEQ ID NO: 636 - protein, 254 aa, synthetic construct
MAFHELWDQKFELVPGKWVFIPSTESRIRGEYIASEIKRKWQAPFYFYHCRQGGHVEALKKHMASRYFCCIDIKSFFASINRSRVTRVLKKHFGYVIAREFSRDSVILLNENDSKKYILPFGFLQSPIIASICLDESALGRRLCKLASSYNFIVSVYVDDIILSCNDIDLLRKEFENIIIATNRSGWKISTEKTYAPSEQILAFNIQMSHGYLGILPERMNLFSTAYQKAESDHQKEGILRYIRSINPNQTVLL

SEQ ID NO: 637 - protein, 251 aa, synthetic construct
MPAKYSSKFQLKPEVWVFVPTLPSLKLGEEIKTLLEKRWKAPSYYFHLRKGGHVAALRSHFSHKYFLHLDIQNFFGSINKSRVTRNLKKFFPYLTARDFANHSTVVHPETKKTVLPFGFVQSPIIASLCLEQSALGSHLDKLHKTAEISVSVYVDDIVISADNEAAITAIKEQTIYAAEQSLFSLNEKKSEGPSLQITAFNIQLSNAMMNITPEKMREFKKTYGDSSSEDQRRGILGYISSVNYDQLSEVI

SEQ ID NO: 638 - protein, 256 aa, synthetic construct
VRNLFDHHFTLKPGTRVYIPTDEGRDRGREIKRRVEKAWKAPPNFFHLREGGHVAAARRHKDHPWVASLDLQRFYDQILRSRVHRSLKRIGFDHDDAFEMACDSVVDKKPPQREFSLPFGFVQSPLLASVVFHHSALGHAIRQLKRDGLTVTVYVDDVTLSGETEQAVLSGVQELETAAADSNFAFNEAKKQGPCDEVTAFNIRFGSGTFEIEEARMDAFKRAIEVGSDWSIDGILGYVGAVNQDQFEALVAGTGN

SEQ ID NO: 639 - protein, 251 aa, synthetic construct
MASLWSNRFETKKGRWVFVPTSECRAAGQVIRKQIASRWDPPRYLYQFRKGGHVSALQLHIANTYFARLDLANYFGSINKTRITRVLKSMAPYRDARQWAELSVVPDPDHPMHWMLPFGFVQSPIIAALSFSRSALGSSIERISTQPNLTVSCYVDDIIISSTNKALVEHAIEDVTTAVMRSAFRLNEEKCEGPTTAITAFNIHLSHRSLMITKERMERFKFTVNNPGSAAQICGIKTYIRSVNGMQIRNL

SEQ ID NO: 640 - protein, 256 aa, synthetic construct
MDSQPRWIHKYEFKPDRWIFIPTEQTIKVGTEIKNAVTTKWPTPSYYFHLRQGGHVAALRHHQADKYFACLDIEKFFNSINRSRLTRSLKQLFDYKTARDYTLLSAVRHPKRVPKTYVLPYGFVQSPVLASLCLRYSTLGNKIDQISRAGAQRISIYMDDIIISGNVESDLRHSMDEIKQAAEKSKFKLNSKKEQEPSIKITVFNVDMTSAYLAIEKQRYLELKCNYQSTTNQNVRHGIGTYVSTINKKQCTALDQ

SEQ ID NO: 641 - protein, 335 aa, synthetic construct
MRFISQTFRRIKMNHRYCRIIFAGYYTVKFLNELIDLLVKILTLFNYFLPKKQMSFPLWSHRYKSKKGKWIYIPTDECRIKGANIIRLLSTFWHSPSYFYHLQKGSHIAALKLHLYNGSDLRQIKNSRYFSYFDITNFFGSINKNKIIKATKCFVGYQMAKDIANASTVTNIGSSEKVLPFGFVQSPLIGSIVLDQSYLGRELSKLSKLHNLKLSVFVDDIIISSDNKKLIQSASERILKAIEKSNLHLNQEKSSICNGSMKVFNIFAKYNCLYLTEHRLTVFAEKLINNSSNYFVVEGIVNYMKMVSPHQSKRLIKEIVCEIGTSRAGFIAKIP

SEQ ID NO: 642 - protein, 265 aa, synthetic construct
MKIQNNNLWDNRFKIAKNGGETWIYVPSDSSRKLGLTIKKHISSNWDIPDYFYHFKSGGHIEAAKLHLNHCHFASIDLKQFFSSLSLSRVTRALKKFWPYEEARILAKYSVVKCLDNRTGQCTMIPFGFVQSPIIASLCLEQSHLGTVLNKIYEMQGIKVSVYVDDIIISGNNLELLEEQYRCLLGAVEKSGLQTSEYKNQEPSSEITVFNMKLKHQSLELKDELINKFHSKFQATDNSNIRDGILRYLVSVNPEQSKLFIENSK

SEQ ID NO: 643 - protein, 262 aa, synthetic construct
MFKSASWINRFEIRPCRWIYEPSQESRINGETLIKQLAVLWKSPDFYFHLRNGGHVQAVRIHLSNKYFAKLDLKDFYGSISRSRITRVLREFYPPDTARRLAKMSTLPHFGDGEHSHSLPYGFVQSPMLASICLAKSYLGSKLAEYRKSKEIRITLYMDDILISSCTEDSLMRCFEDLKDSVKKSKFNVNDDKSHGPQSHTIIFNIEVSQYQMNLTDERFRELHVAYEKSKSKSQRHGIGAYVGTVNKIQALELDKPTFEFP

SEQ ID NO: 644 - protein, 248 aa, synthetic construct
MPVQFQNYEFSYLRSGKPIFAPSDLGKRIGEDIKNQVEAAYSFDDFVFHLRHSGGHVAALHAHRDHKYFARVDIARFFYSIARNRVQRALAEIGILRARHYAKWSCVKNPYLDPTYALPYGFIQSPILSSLVLMQSAVGNYLRSISTGGQISVSVYMDDISLSSDNNDVLVEAFEKLKQNLGEANFGLNIAKERTPSSAMDVFNCDISRGKVGVQQQRVDLFYSQERSPLSIAGFEDYCERVIDGNAP

SEQ ID NO: 645 - protein, 255 aa, synthetic construct
MVPKWSSKFELKLGTGKWVFVPTEESKETGAKIKAAIQECWSPPSYYYHLRSGGHVEAVKSHLGHTTFLHVDIQDFFGSINRSRVTRNLKAKFSYEVAREIANASTVRHPDDKARYIIPYGFVQSQIVAALCLDQSRLGTYLDKLCKQKDVALSVYVDDIIVSCNDADQANAMLAGLIAAAESSGFTLNPDKQEGPAAEITAFNILVANDSMAIDGNRFAKFVEALAATSSEHQRAGILSYVKSVNVDQSDSLVA

SEQ ID NO: 646 - protein, 256 aa, synthetic construct
MPSHKRWNSKFQIKEGVWLFVPTEDTINNGLLIKKLIEANWRAPEHYFHLKSGGHIKALHTHLHNKYFIHLDIQNFFGQINKSRVTRSLKEHVPYEQARKIAVESTVRLPESTPVKFMLPFGFVQSPIIASVCLSKSALGRHLANLVKQENFAVSVYMDDILISSNNLEELNIQMDLIKTASEKSGLPLNEKKQEGPCVNVTAFNICISQGLLKLIPSKLQEFINTYSNSTNEHQRAGILNYVLSVNEDQASLVAL

SEQ ID NO: 647 - protein, 255 aa, synthetic construct
MAQKYISKFQLKPGVWVFVPTIANAAKGNEIKSLLESRWKLPKYFYHLRKGGHVEALKAHLNNNCFIHLDIQNFFGSINRTRVTRCLKDFFSYSVAREYANESTVMHPRERKTILPFGFVQSPILASICLEKSTLGIYLKRLSKNKKIVVSVYVDDIVLSTNDEALFNEITDSLKLAADKARLSLNDEKTEGPSDKITAFNIELSNKIINITDKRIDELKVAYLSADSEHQQKGILGYIASVNELQKNAILEALD

SEQ ID NO: 648 - protein, 262 aa, synthetic construct
MNLKKRWLSKFKIKNSSWVFVPNKYARNYGNNVKIKIDELWKKPDYYFHLRDGGHIEALKCHTNNYYFIHTDIKDFFCCINKSRLTRNLKKFFNYEKARQIANESTIQCPNSNFKKYILPFGFIQSPILASLCLHNSKLGIYLDKLNKLPNISVSVYMDDIIISNKVKSELDKILEDLISISEYSKFPLNKQKTEICSKITSFNIELSYKKLKITKKRMIEFLDDYKNGYKYQKIGILNYIFSVNKKQFEKFLTYLKANCLA

SEQ ID NO: 649 - protein, 251 aa, synthetic construct
MKNYFRKIPLGDGKFAYEQTPEARKEGENLVKQVFKRWDAPSFFFHMKAGGHVAALASHKKNCYFTKLDISRFYYNVTRAKLVRSLQKIGVPFEAAMYYAQISLVCDRGHRFLPYGFHQSPALSALVLDKSLAGRYLREAARKFTLSVYVDDIILSSRNSEALAKSSDQLVQALHGSNFSINESKSKICSASCISFNVLIQENSTEITDQRLDQFKRQISEVNGKESVVQGILQYVHSISPEQAKGLAREV

SEQ ID NO: 650 - protein, 252 aa, synthetic construct
MARSFEKFYEIKEGRFVFEPTTKARKIGEEILNDLFKIWSPPDHFYHLGKSKGHVEALRVYSKSRLFASIDIENFFGSVTRTKISRSLRAIGIDDKKGFSIAYDSVVDFGGTKTLPYDFIQSVALATLVMEFSALGSAIRQAIKSNVMITVYVDDIILSGEHAETLQHHFDEFVRTTNAAKFNISAKKCQNVSDKIEVFNCNLSKSHISTTPKRMAQFKVDYAHASDARRASIEKYITAVNKSQVAELGRLH

SEQ ID NO: 651 - protein, 244 aa, synthetic construct
MPIRFENFDYSFSLKGRPVFKPSERGREIGLQLKQEVEARVAFDTFYYHLQKGGHVSALHSHRPHRWFARVDIERFFYGIGRNRVAGALAEIEIPKAGYRAKWSTVRNPYENPRYSLPYGFVQSPILATLVLMRSNVGRFLRSLPPSITASVYMDDIAISGDDEAELIEAFEELCNVMHEANFVLNRDKLEAPAAAIELFNCDLLHEMTAVREERRALFFDEPHSPASEDAFLRYCDRVEAGNA

SEQ ID NO: 652 - protein, 260 aa, synthetic construct
MKIMEPRWDSKFELKPGKWVFVPNGDTIELGAKIKDELRQRWKAPAYYYHLRQGGHVAALKAHLGQTCFIHVDIENFFQRINRSRVTRVLKGMYSYAEARDIANLSTVRLPEDAQKRYILPYGFVQSTLLASICLRKSALGNYLKQLSATDGIEVSVYVDDIIISLNDEALAENIFADVKRMAEKSGFDLNQKKEQRPADKISAFNIELSQNSLHVLPDRWHAFLDAMREDGNPHRHQAILGYVDSVNPAQANQLQAEML

SEQ ID NO: 653 - protein, 257 aa, synthetic construct
MTIEVQRWEDKFEIKPGVWVYVPSVEARKVGGKILQAVRNKWIPPLYFYHLRTGGHLKAARLHLKSDFFAVVDIKQFFQSTSRSRITRDLKSYFTYSQAREISTFSTVRNLSHSPHKHVLPFGFVQSPILATLCLDKSYFGSLLRRLNKHHDLKLSVFMDDVIISSNDLAQLQAAYDEALVAMRKSGYQANMSKTQAPSSKISVFNLTLSKGVMKVTSQKMSDFLIDFYSSNYEPHRIGVKNYVEAVNPGQAKLFKL

SEQ ID NO: 654 - protein, 254 aa, synthetic construct
MYESSWSNRFEVKPNRWVYNPTNSCRSIGKGIQWKLRKRWTPPPYYYHLRDGGHVAAIEVHLENNFFATLDIKDFFGSISRTRVTRALKKFFPYIEARNFAKQSTVKVMRNYPFSHQLPYGFVQSPILASLCLFDSKLGRELHALHIKKKALVSIYMDDILISSSNKDELIKIYEKLKIDLVKSKFNLNESKSLSVSDSVTAFNIDFKNNDKKINYDRLVRFQYAYLLSNSKAQKRGIASYVGSINKTQAKTFI

SEQ ID NO: 655 - protein, 255 aa, synthetic construct
MPSSERWVSKFKIKPYSWVFIPNKETIQNGINVKKSLEAKWTPPLFYYHLRSGGHVKALKSHVKNNFFIHLDIQNFFSSINRSRVTRNLKVFYSYTDARNIAMDSTVRLPESIDKKYILPFGFVQSPLIASLCLQQSRLGNYLKELYSKKGISVSVYMDDIIISGNNLTNLTLILKKIKLVAEKSKFALNSDKEEGPAKMITAFNIELSHDLLKVSDTRFRVFFADYKMTENENKRNGILGYILSVNKEQASELK

SEQ ID NO: 656 - protein, 255 aa, synthetic construct
MQNSHKWLSRFRLKSNTWVFIPTLETVKEGKLLKKVIEFKWPPPPNYYHLRSGGHVDAVKYHMGGRFFVHADIKKFFNSINRSRITREQKPYFGYEKSRAIAMESTVSIPLDSGQVFALPFGFVQSTIIASLCLRKSSLGNTIEMLNKTDGVRVSVYVDDIIVSTQCLKKAETALLMIQKSAERSGFSLNKEKSQGPSDKITVFNIDLKQNLIEITSWRFNELLSSYKNASSDKQKSGIWGYVNSVNSAQASMLV

SEQ ID NO: 657 - protein, 259 aa, synthetic construct
MIPNFENRFQIESGKWIHEQADEYEVEARKILGRLFSKWRPWPLFYHLRSGGHVAASHAHVGNPLRVRLDIDNFFGSISRNRVVRALKRVGFSYEEADDFARKSTVPFNSGFVLPFGFVQSTALATLVLQKSPLGAALKNMRDRDFTVTVYVDDIIISGDVDPSEMEKEVDKLFREARRSRFSFSSSKIAGPEPSIRAFNLILSPDLVSVAEDRFSEFSEEVDTEGDTPKVRAILGYVKTVNQKQYDYLANLLTDAEGS

SEQ ID NO: 658 - protein, 251 aa, synthetic construct
MVHNYEYKFEIRPNKFVFVPTPQTRKNGKKIVREVMQIWTPEDYFYHFGKRGGHVAAMRPHVGNSFKASLDLTKFFMNVSRAKVVRALKRAGVSSSRSFDIAFSSCVEFKGRKFIPYGFPQSMLLATMAVENSALGSQIKTLKASGVYVTMYVDDIILSHNDKAVLCEAYGELVASANQSGFEVSSKKSSPPSVGVEAFNCNIDKDISIKHDRMAEFVSQICEGTPSTKEAVLRYVDVINSSQADELNLIT

SEQ ID NO: 659 - protein, 250 aa, synthetic construct
MKRWEHRFEVKPGRWVYVPTPIGKASGEVIRLAVSKVWSSPSFYFHLRGGGHVAALRRHTPHQYFFRCDFDDFFGRINESRLTRCLKRRFSYAEARQMARESVVIKPGSKKTMLPYGYVQSPILASLALDKSRVGRFLRQCDLSEHLTVSVYVDDIILSSNDDGLLGDAAAELQQLALDAGLPLSSEKTAGPASAITAFNVELSHGSMSLEHDRLQRFREAYAMASSPQVEAGILGYVHTINPAQVAAVP

SEQ ID NO: 660 - protein, 255 aa, synthetic construct
MNSIWLHRFEIKKDRWIYVPTNESLDYGNWVKNSLEGKWKAPSYFYHLHAGGHVKLVHDAKDYQYFSRYDFENFFAQVTQNRVCRCLKDHFSYDQAREIAIRSTVKQQHTRSVPYGFPQSMLLASIVLDHSRLGKYFNQLRRRGFFVGVYVDDLIIASNNQNELQKASTELERIAIQSNLVFSKSKVERALTKISPFNIDLAYSSLEITYSRYAKFVERIQAENDNFTKDAIKGYVQKINPKQADYLALLGKLDH

SEQ ID NO: 661 - protein, 257 aa, synthetic construct
MLENYDHRYTDDGGRLIFVPTDDGRLIGYDLIRRILKRWRPPAFCYHFQRGGHVAAAEAHLPNRLFVRMDIQRFYDAVSRNKVHRSLKSIGIKQRHAWEAARFATVSRSPSGRGRPYSLPFGFVQSPMLATVALMTSALGNAIAAVHAARAITVSVYMDDVLLSGECASVLANAKTFLEAAAAESGFTFNPEKGSGPTPSVTVFNLVIQHRSMVLTTDRFTDFEDDIRKSRNEDITNGILSYVGTVNVAQATALARL

SEQ ID NO: 662 - protein, 252 aa, synthetic construct
MPQKWDTRFQLKPGTWVFVPTDEARELGYVIKELVETRWRPPKNYFHLTNGGHVRAISSHVHNTTFAHLDIQDFFGHINASRVTRWLTPLAGYAKAREFAKASTVPYPNHGGTMLPFGFVQSPILASLCLFHSALGRCLAELPRKLGAVVSVYMDDIILSASDHSVLEQAVKMVEESAERSGLPLNPDKHEGPAAGITAFNIALAHQSLRINDERWNSFLTEFQASDNDSVRRGIHSYVHSVNVEQANNLGL

SEQ ID NO: 663 - protein, 256 aa, synthetic construct
MPTFYDHKFTSPTKPKRWIYVQTDDERAAATHLLAVLRKHWTPPKYFYHLRKGGHLSALQQHAHDIFFAVLDIEGFFGSITKNKIARALKNIGFAWQDAVTVAHRSCVQEGTKRILPFGYVQSPMLASIVLNKSALGSALEAVKKQGLNVSVFMDDIILSHPDNSDLVGDALTTLNEAADISHFHFSAEKSQAVAEKVHAFNIILSSESLEISPNRFEKFAQTVLQAGDGATRAGILGYVAQVNTAQYDQLAQLTH

SEQ ID NO: 664 - protein, 275 aa, synthetic construct
MPLAFENFLYSYKKNGKPIYAPNPFGEKLGAELKRKVNKAYKFDSFVYHFKDGSHVLALHQHRNNQFFCRIDISKFFYSVQRNRVKRALKDIHVQRPEYYAKWSTVKNPYGAGYVLPYGFVQSPILATLVLAKSSIGIYLRGLPTSVTVSVYMDDICLSGNDEAELQTAFEGLIVAVAEAGFALNHDKTRPPAAQIDIFNCSITTGQTEVLQDRIDEFFAEDRSAASEEGFKTYCNIVESMTWRTGHKKKRRRVYFRSLPKPAPVVAAAPVTQTI

SEQ ID NO: 665 - protein, 275 aa, synthetic construct
MSLTWVHRFERKPGRWVFEPSEEARKQGAEIKALIETHWKPPSFYFHLRQGGHVAALRAHLASTWFVKLDIADFFGSVSRSRIARLLKEFVPYRDALHMATSSTVRHPTEVSRLMLPYGFVQSPVIASLALAKSALGKYLRTLHSDQDLVVTVYMDDVIVSGVDEHRLADVAQKLDSLAKRSRFELNADKTHGPLAKLRAFNIDLADAAMVIAPNRLDQLKNVLEESTNGFQIEGIRSYVKSVNEEQAAELGDPLAGTDTEPHGASKDDLGKPPA

SEQ ID NO: 666 - protein, 235 aa, synthetic construct
VFVPTPAAAATGEWIKAQIEAHWTPPDYYYHLRSGGHVAALKSHMGHTNFLHLDVQDFFGSVNKTRVTRCLKTKVGYALAREWANASTVTHPKNKTRSIIPYGFVQSPIVAALCLAESALGVCLDKIRKTKGAVVSVYVDDIIVSSNDSSLCLSLLAMLKTAADRARFALNPDKEQGPASQVTAFNIVLSSSSMQIESARLQEFVEALAKATSQAQRKGILSYVSSVNADQGKAL

SEQ ID NO: 667 - protein, 253 aa, synthetic construct
VNPKWSSKSEIKPGRWVFVPTVEARDAGKALKKLIEDHWQPPAYYYHLRPGGHVEALRSHAGHTSFLRVDIQDFFGSINRTRVTRCLKPMFGYELAREWANASTVIHPDNKERSIIPFGFVQSQLVASLCLAESALGRCLEKLNKDPALSLSAYVDDIIVSSADAERCSAVLEELNIAAKRSRFTLHTAKQQGPATAISAFNILLSAEGLQVEAERLKAFEAALAEATSDAQRAGIIGYVSAVNAAQGESLGA

SEQ ID NO: 668 - protein, 250 aa, synthetic construct
MPAKWLNRFELKPGRWVYVPAPDARASGTAIKVEVERLWSPPDYFYHLQSGGHVAALRSHLGSSIFFKADVQNFFGSINRTRVTRCLKSKFSYKVAREWAVASTVQDPGSTNMTLPYGFVQSQLLASLCLSESALGRVLHRISRKDGAAVSVYVDDIVVSTRDAALLEKLHADVVLAADRSRFTLNPAKSTAPSPQISAFNILVSEAQMSIEPTRLAQFASALARGATPSQKQGILNYVNSVCPAQLGTL

SEQ ID NO: 669 - protein, 258 aa, synthetic construct
MWFETPWIHKFEVKPGSWIYVPSALTRNRGEKISQQVKNVWDAPDYFYHLNQGGHVKALKSHSNDNYFASIDISDFFGSISRSRITRALKRKLGYEKAREIAVASTVKHHILGQHSHSLPFGFVQSPILASVCLDSSALGERIKTCSTNKSLNISVYMDDIVISSDSKEELLTEFGLLKDAAKSSHFSLSIVKESLPSTSVVAFNIELSHRLLKITDGRYSQFIQAYRATQSIFEREGIVSYVRTVNYAQAKSLECTK

SEQ ID NO: 670 - protein, 264 aa, synthetic construct
MTLPWKDRFEVKPGRWVYIPTQETLEKGRQIKALVASKFQAPSFYYHLHEGGHVAAIQSHIDDRYFLNVDIKNFFGVINRSRITRSLKKRFPYAQAREITVQSTVRVVGESRYEYHLPYGYPQSTILASICLVDSALGRYLNSLSNQCNVSVYVDDIIISGNDPDELQQISDTLAEKSEVSRLFFGRQKAHQVSETITAFNIELSQHKTKITHQRYSQLLQQALLADNESVINGVLGYVRSVNREQHIEMHKELFTLGHIKAPA

SEQ ID NO: 671 - protein, 255 aa, synthetic construct
MPSLWKNKFEIKPGYWVFEPSEECRVIGNELKNIILGKWQPPDYYFHFQYGGHVAAAKSHFGNIFFLKLDLSKFFYSINRSRITRNLKEFFEYSTARDYAKSSTVRDPNNKYKFFLPYGYVQSLCLASLALSKSQLGTELNKIRKNNGCTISVYVDDLIISSNNIELLYKIKDVVIDSAKKSKFLINENKTEGPSTLITAFNFDISYNSVKINETRFYELLENHKKSDLMTQKEGIEGYVRSVDLNQYQFFMSLI

SEQ ID NO: 672 - protein, 258 aa, synthetic construct
MLPNYEHAFKNSNGKWIFVPTDESREQGYAILKEIHDYWEAPKYFYHLQTGGHVAALKAHQNKKFYVRADIKRFFSSISRNRIVSSLKKTGLFYKRSKEIADTSTVMSKETPHKKVLPFGFVQSPILASIALDHSAVGKFLRSDIVGVTRTVYADDFLYSSDDKEILQKTYLDLQKSISQSGFAINNGKSHAPQEQTCIFNVDITKNSLKISDSRYQEFTDEMFGMNRLRSEAIAHYVRTINLEQSNKLLSLFKNGSG

SEQ ID NO: 673 - protein, 245 aa, synthetic construct
MAVAIPNFEYSYRRKGKPVFVPTVIGRRIGKEVKSEVESAYNFDPIYYHLRCGGHVAAMHHHRDSLLFARIDISRFFYSISRRRVQSALDRVGIANARFYAKWSTVANPYGNPKYALPYGFVQSPILASLTIATSQVGDHLLGLPAAVSASVYMDDISLSSDDRGELERAYSATLAVLEADGFQVSADKLRAPAAAIDIFNCDLSHGRANVRDQRIAEFYGRGPDQISEEAFVAYCASVEDGNRP

SEQ ID NO: 674 - protein, 558 aa, synthetic construct
MNIEEVQRRLWEQSRAHRQQRESGSPLFPANPYDDRIRKLMDLMHNPTWIAAACDRVLKRSRGKAVGVDGVRVRDFERSCEHRLEELRLELKRGTYQPLPLRRVEIPKANGKMRRLGIACLRDKIVQEAIRMALEPIFEAEFHRNSYGFRPNRSAHHAIAQCRNAALAGYAWTIEGDVKACFDEIAHKAILRCVREKVMDNKFLNLIDRLLKAGVEIDGVVHPTTKGVPQGGVASPLLANAVLNKLDWFLQSKGFYDAAKRRRSSHSLPNIRFCRYADDWCVFVTRCDRQYAERLKDEIRDFLRETCGLELSAEKTRITHVRDGYDFLGFNISVGVGQSGKMVPKVKVGRKAIANIQRRLGESLRYRPMQESISVRLVRTSAVIRGWSNYFKAAHNFSRVAHGLDHKAFWITAKAICRKEDISTAKCFRRYRLGNKIGVHEACTLARFQETASSYYYAAPKPYQPGCNRYLDDHEWEAALVLSEHARPGSGDLKWKALVRDGFHCRGCAVVVSARTSHADHIRPVNSFANLELANDLDNIQTLCRWCHKQKSARELCA

SEQ ID NO: 675 - protein, 564 aa, synthetic construct
MYPTKMAEKQAKLAETALSNPEHRFHNLYDLMHWRYWIEEAAAKVLARPGSSTAGVDGKTRVDFEKNYATEISRIVTELKDKTYAPQPVRRMHIPKGNGKTRPLGIPILRDRIVQEALRAILDPIYESDFQHHSYGFRKGRCTMDAVAVLMPLFNTQVKHYWVIEGDIKSYFDNVHHRKLMKLLRQRIADKALLDLIWKFLKAGVMEGRLFACTETGVPQGGVISPLLANVYLNEFDKWAERQWHNLTPYDRQRRRQAGLGNYTMVRYADDFVIVSNGTRAEVERTKEAVRRFLAEELHLELSAEKTLITHVNDGFDFLGFHIQRCKPEGRWVVHLRPTEKNKQRIKHRMKELTSRNWTWMDEYTRLTALNRIVKGWCMYYRYTSLHSDLEEITRYIWFRYLQWLLRKHKGSRKHQLIQEKTAVIHNRTRWTATVAQDGQAITAHQWLPTPKELKRERYRLKGRGGFAHPYLEPALDTTDNPEWEGGPAEVLFTEVIGARSRRGEPLEMAELKLRRKLRDRFTCQHCGSREHLQVHHVGPVTSTSIDDLITLCLKCHQQQHRQN

SEQ ID NO: 676 - protein, 509 aa, synthetic construct
MIISEMQHKLATWAESDPNRRFDRLLRLIANKEWLAEAARMVLASSGARTPGIDGMDKQRLQVKLDQHLDDLRASLLEESYRPQPVKRIYIPKSNGKLRPLGIPTLTDRIVQRAMLMAMEPIWESDFHRLSYGFRPERSVHHAVRTVRIQLQDGADTTRGRWIIEGDLASYFDTVHHRLLLKCVRRRVQDGRFVDLLYRFLKAGHIDRGLFTASSEGVPQGGVLSPLLSNIMLHEFDMWLEAKYLNKKARKDRWAWNFGIQQGRPITVRENRQWKPAVAYCRYADDFVVIVKGTRAQAEEIREECRAFLEGKLKLTLNMEKTHVTHVDDGFVFLGHRIIRKRGAHGRMSIVTTIPKEKAKGFVRRLTETLSGNHSVSTVDMIAGLNRQLVGWAAFYKFTDFTAYVFRRIDHVVFWKLAHWLGHKYRSRIKPLMRKWFRVPEPGKAKTWLVFGRNERGDPVGKALHRLVSSPKAQFRWRNPEENPYIFRLEDRSTVTSHYHDVAMAMGQA

SEQ ID NO: 677 - protein, 507 aa, synthetic construct
MQNKLATWATESKERKFDRLLRLIANRAWLSEAASITLASSGARTPGVDGINKHKMEEMLDLELGNLRYELLTGTYCPRPARRVYIPKANGKLRPLGIPCLRDRIVQRAMVMVMEPIWESDFHPQSYGFRPARSVHHAIRTIKMQLQDGNERTDATAGRWVVEGDLASYFDTVHHRLLMKSIRKRISDRRFLTLLWRIIKAGCVDRGLFRASSEGVPQGGVISPLLSNIMLHEFDQWMEAKFLSKKVRKDRWAWNFGIQNERPIAIRENRQWKPAISYCRYADDFVVVVKGTKAHADEVRETCRAFLEDRLKLTLNMDKTHITHVNDGFIFLGHRIIRKRGAKGRMRPVSSIPWDKYRRFTERVVKQLSGNFSMNTMDLVESLNRQLVGWANFYQYTDHTVTIYGKVDRTVFWKLGYWLARKYKRGFRSLMRDYVRSPEKGKAKIWVLQGQNSRGFYGELALKRLVTSHKGWFTWRTPAENPYTLRSEKPRTIQSYYDDVAFALSNA

SEQ ID NO: 678 - protein, 507 aa, synthetic construct
MIISELQRKLATWTACDKTRRVNRLLRLISHHEWLYQAAQITLSSKGAKTPGVDGITKIHLQTNLHTYLAQISDDLRSGHYQPMPARRIYIPKANGKQRPLGIPTLRDRIVQRAMLMAMEPIWENNFHSLSYGFRPERSVHHAIRTVKLQLTDGRTSRGRWVVEGDLSSCFDTVHHQLLMKCVRKRISCQRFNHLLWQFIKAGHIERNLFCATTEGVPQGGVISPILSNIMLNEFDQYLNECYLGKKVRKDRCNWNSSITDKRPIASKENRQWKPAVSYCRYADDFLVIVKGNKQQAEAIRDQCRDFLEGKLKLTLNMEKTHITHINDGFVFLGHRLIRKRGVKSNMRVVTGIPLGKAKAFSHSLSQALSGDHSCSKIDKVEQLSRKLKGWAQFYRHTDFTSKVYNKIDRIVFWKLAKWLASKYRCSIKSLMIKWIKRPKANKAKTWVLFGKSNRGNLCEVSLFRLVSSPKLPFRWRLPELNPYLRDEIRKTVTSSYRDVAMAVSHN

SEQ ID NO: 679 - protein, 618 aa, synthetic construct
MTKQKKLRHLEYYDLQERFDELFAKSKQGELFTNLMELISSEENIKLAYRNIKRNEGSNTSGVDGKTIKDIERVSADKLVEVIQNKFRFYKPKPVRRKEIPKPNGKTRPLGIPTIEDRLVQQCILQVLEPICEAKFHERNNGFRPNRSAEHALAQCYRMIQIQHLHFVVDIDIKGFFDNVNHSKLIRQIWSMGIRDKKLICVIKQMLKAPIIMPDGTTIKPDKGTPQGGILSPLLANIALNELDWWISSQWETMPTHTQYKPHISKNGTISCANKFRVLQESKLKEMYIVRYADDFKIFCRKRSDADKIFVAVKKWLKERLKLEISEEKSRVVNLKKKCSEFLGFELKAVRKAKKYVVQSHISEKSKKRVTETLHKKIVEIEHSKNAKELGIHVRQYNTVVFGIHNYYRVATHISCDCSAIYNTIRKAIYNRLRGQLKSKGVIHSAFIQKNYGKSKMICFLGDAPLIPFSYVQTKTPRYKKVKICKYTPEGRSEIHKCLKFDESVIAVLHMLAKSHMNGRSVEYMDNRVSLYAAQYGKCAVTGKVLWIDEIHCHHKKPVSQGGTDEYKNLIIVHVNAHRLIHATNPETIMVYLNKLNLTKPQLKKLNKLRTMAGNPAI

SEQ ID NO: 680 - protein, 632 aa, synthetic construct
MTSRNKKRRKLRNAEYYDIQSLLDKLYADSKNGKVFTNLVELICLPRNVELAYRNLKKNSGSKTAGVDDKTIDDLAGLTNEQITDYVRTRLNYYKPHRVRRIEIPKKNGKMRPLGIPTIYDRLIQQCILQILEPICEAKFYPHSYGFRPNKCCEHAMARAYKLAQNHKLHHVVEVDIKGFFDNVNHGKLLKQMWTLGLRDKKLICIISQMLKAEIAGIGVPTKGTPQGGILSPLLANIVLNELDWWIASQWETFPTRHQYRSDVVREGKPGINHGHRYRAQRESNLKECYIVRYADDFKIFCRNKVDAERIFQATTQWLKERLFLEISPEKSHIVNLRKGYSEFLGIRFKLVAKGKEKDGKPKFVIRSHICDSAVEKIAEKMYVEISNLAHCADNRQLHVVVDNINLYVLGIHQYYQMATHIVTDLNPINRSVLSRLEHKKNLKCLLTEQGNAKLPKYVVQKYSASKCVRYIKGRALIPIGYVQTKPPMFSISGVCKYTAEGRSLIHNNLQTINISTLHYLMNHPNKNRSIEYNDNRLALFCAQNGKCAITGKVLEIGDIHCHHIVPIHAGGTDKYQNLKIVCVDIHKLIHAVDERTIRGLLEKLELTAYQIKRLNYLRKMAGNQELQTKAA

SEQ ID NO: 681 - protein, 645 aa, synthetic construct
MKLSIPKSEEEFQKLKDKLFEETKTALSQNKTPIFKNILEVAQCDVVILTAIHKLKGNKGSNTAGVDGETMRMDILNKDFNKVMKEVKLQFTHYTPDKVRRVHIPKSNGETRPLGIPTIADRVVQECIRSVIEPICEAQFFEHSYGFRPWRSTENALGRITDVVQKTGYHWIIEGDISKFFDKVNHTKLIRILWSFGIQDRRILMMIKAMLQAGIMEEINKNELGTPQGGIISPLLANVYLTPFDNFVTREYENKKLRKNYSSGQRSLILRGLSGKPRIKPIPCYLIRYADDWVVITNSKKNAEKLVYKYEKYLRETLKLELSASKTKITNVRSKAIEFLGYKYKQVRGKATKGYISRTKPIEEQLDKKITELLKDIKRLKKCKDTETLISDINIINSKIRGLVNYYQVTTWGSESMKKYNQRVRWAAFRAIRRRIGAKSAKGKNKKVDWVRANLCANLVGIHSNYTTALPSLKYKEHIVGVTDLAFIKFRQPVLLNQKETPFTQEGRERHLARTRKRPPQYRLDFIFGADATTTKRLLASRKRKNRLYNFEFYLNRAYAFNRDKGKCRICGKEIAPHEIQTHHVDPSLKTELVNKVSNLASLHDTCHNNMHNLTLTEQLLQAKGYTNTAVKKILNFRNKLAITL

SEQ ID NO: 682 - protein, 606 aa, synthetic construct
MTLNTKGKRAEYHDILPLQNELWENDTPKNLYKLITSKRNIICAYDCLRRNTGSHAKGVDGLNIEDINHVSLDRLIKTVRAKLLDYKPDPVKRVYIEKDNGKFRPLGIPTIWDRLIQQCIKQIIEPICEKQFAHNSYGFRPKRSQENALADVMKSLNLSKHRYIVNVDIKGFFDNVNHKILINQLWSIGIKDKSVLQIIKKMLKAKILEPNGKLMTPSKGTPQGGILSPLLSNVVLNDLDHWVNDQWIECGIETPSITIHWNKNGSPGGDKYRHLRKFSTLKEGRLVRYADDFVITCKTYNEAVRWSHAVTNYLKRRLKLEVEDSKSKIINLRKKYSDFLGFKFKLKKKRNKWVAESRISDKKKKKILASYRQQIRNTWSGAEIYKLNTKTFGLWEYFENATAVSVDMSEIAWRLSKIIYNHFSMNGEFRYLTEAELKSTGVGIKMTKLQNHCKVWVQHGVPVMPLSMGKTRYPLCKRRQEKPYEFTREKKDWQSYIILIESNITSSTLFHINKVSKYAQQKGKCAILKQFTGLDFHCHHIIPRYLGGDDSYENLIVLDRRVHNLIHARYDWKIKEMIKELNLNKQQIAKINKLRNQCKLNEIEID

SEQ ID NO: 683 - protein, 636 aa, synthetic construct
MAKRIVNKAERNAERYDAKEMGYQLYEDSLNGRVFDRLMPMIISEQNIILAYRNICKNNGSKTPGTDGKTIVEIQELPIEMVIKTIRNKLNYYQPKKVRRVEIPKDNGKTRPLGIPSIWDRLIQQCVLQVLEPICEAKFHERNNGFRPYRSTQNAIAQCYKMAQLQNLHFVVDVDITGFFDNIDHSKLIRQLWGLGIQDRKLIMIIKQMLKADILFNDIVITPETGTPQGGILSPLLANVVLNELDWWVANQWEMFKIKEGSTGYEFAKVDKEGNVLTVDRTQKWNKLRAKTELKEMYIVRYADDFKIFCRDYVTATKVMYATKLWLEENLHLQTSDEKSGITNLRKNYTTFLGIKFKVVPKGNKWIIRSHMADKSKAKVISKLSSVWKDIKNPSKQSELDKNINLYNAMVMGMHNYYCMATLVSADFAEIAFKVTGKSNGMNHNRWCFPIEKQGEITSKYILEKYGKSKQFRWINGRMIVPIGYVAYEYPKYKRREVNKYVRKYSDAENCISFEVMKYMMENAHLYPTLEMADNALSRYIAQKGKCAVTHNALTVVDMVCEHIKPCKGERNDTYRNLIILSKEVSDLVGAENSNKIDKILKNLLLTKEMQDKINKLREHRELEPIQFDDYIGTKK

SEQ ID NO: 684 - protein, 424 aa, synthetic construct
MDGSKLKVKSFEIPKRLVYEAWEKVRANKGAPGVDAVSINQFAAAEADNLYKLWNRMSSGSYMPGAVRAVEIPKDHGLGVRTLGVANTADRVAQTAAAMLLEERLEPIFHPDSYGYRPGRSAHDALAVARKRCWSQDWVIDLDIRAFFDSVPHDLLLKAVAHHTEERWVLLYIERWLKAPMQMPDGTLVARERGTPQGSPISPLLANLFMHYAFDRWMARDHPGCPFERYADDIVAHCDSKEQACSLLAAIAERLGAVGLELHPDKTKIVFCKDANRPGTSEHTSFDFLGYTFRGRLAPGPRGYFVSFSPAMSTKAKKAVGQKVRAWHLNRRTGTDLSGLAEDINPHVRGWINYYGAFYRSELHSLARRIDEHLVRWAMHKFKRLRGKPSRAWDWVAAARQRQPKLFAHWHLVSSTRGRLVGAV

SEQ ID NO: 685 - protein, 413 aa, synthetic construct
MAKSFNLSKFAVWDAYLAVKANKGSAGIDGQTMEDFESDLKCNLYKIWNRLSSGSYFLPPVRRVEIPKSNGTLRPLGIPTISDRIAQMVIKKRLEPLVEPHFHDDSYGYRPNKSALDAIAQTRRRCWRDDWVLDMDIQGFFDALDHKLVMIAVSRFTQCKWTMLYIERWLKADVVMPNGERVKRTQGTPQGGVVSPLIANIFLHLGFDSWMQKEFPCIHFERYADDIVVHCRSQKQLEYIGQMIKSRFAQCKLSLCQEKTKIVYCKDSKRLGTYSSQSFDFLGYTFRPRSCRDKEGKFFVSFTPAVSRKSMKAIRLKIKEHPMVKGCFSQGISELARAINPMIQGWINYYGHFRKSEMSTIYDYINEKIMKWAMRKFKHLQRRKKRAGQWLRKLYSKAPLLFAHWRIWKWVAE

SEQ ID NO: 686 - protein, 434 aa, synthetic construct
MSTELERISKLAGENRQLKFLSIAHLLTPEALMEAFKSLRKDASAGVDGVAYGEYRMEAGRRIQELYERVRGKRYRAQPLRRIYIPKEGGKQRPISIPTVADRIAQTVVTMVLEPEVEPRFHPDSYGYRPGRSALDAVGKARERCWRYDWVIDLDIKAFFDSLDWDLVERAVAHHTELAWVRLYIARWLRAPVQKPDGTVELRTKGTPQGGVASPLLSNLFLHYAFDMWMQRSFPSVPFERYADDAIVHCGSERQAKMVLSAIRDRFAECGLELHPTKTRIVYCQDSDRLGKYEHVSFDFLGYTFQPRRAKNHRGKFFVSFLPAISTKAAKAIRATIREWRLASTRNNQSLEDLAQLINPVVRGWMNYYGRYYRSKCVQVLRHVNLALAAWARRKYRRFKRRERESLHWLGRIARRDPNLFVLWRLGIRPEAGS

SEQ ID NO: 687 - protein, 415 aa, synthetic construct
MNEAKPFVVEKRVVMESWLQVKANRGSAGIDGIDLKSYESNLQKNLYKLWNRMSSGSYFPKAVKLVEIPKPNGGKRPLGIPTVEDRVAQMVVVMYIAPRLEAIFHDDSYGYRPMRSAHSAIAKAIERCNENLWVLDMDISKFFDTIDRGLLMKAVQKHVSEKWILLYIERWLKVPYQTSDGGVVDRMMGVPQGSVIGPVLANLFLTYVFDLWMKHYFPTIPFERYADDTICHCRTEKQTQYLKACLVKRFADCGLKLNEEKTKIVYCKDSNRKGNSEHTSFDFLGYTFRPRKAKNSKTGQIFTAFSPAISKKSMMKIKTEIRSWHLNRQTHLSIEQIAERINPIVSGWMNYYTRFGKSEFWKVMSYLNERLSRWVKRKYKRFRTKLSKAYDWLVECAAHNRHMFSHWMSGYIPHS

SEQ ID NO: 688 - protein, 416 aa, synthetic construct
MIQTKSQDITKRQVWEAYKKVKRNKGSAGVDGVDFETFEANLENNLYKLWNRLSSGSYMPPAVLRVEIPKSDGGVRVLGIPTIADRVAQMVVKDYLEPKLEKIFHNDSYGYRPKKSAHQALETTRKRCWQYPFVLDLDIKGFFDNIDHELMIKALELHMDTKWEMLYIKRWLVAPVQTKEGLQQRERGTPQGGVISPLLANLFLHYAFDVWMRKNYPTIPFERYADDAVCHCRSQREAQQLKADLSQRMEACKLELHPDKTKVVYCKDDKRRGEYENVSFDFLGFTFQPRVAKNSKTGEFFVGFNPAISTKAAKRIRLVMRRWKVQLMSHLSLEELSDRLSRVIRGWVNYYSIFARHKLLDVMRYFDRRLERWAKRKFKSLKRRQGRAHKWLMRIARKEPNLFPHWQMKYAKLTVR

SEQ ID NO: 689 - protein, 410 aa, synthetic construct
MHDISKEEPFRAWERVKKAGGGAGYDGKKIQDVQLDLDNQLYKTWNRLSSGSYMAAPVLLVEIPKAGGGKRTLGIPTVMDRVAQMVIKDRLEQILEPKFHKDSYAYRPDKSAIDAVGKARERCFQRKWVIDLDIKGFFDNIDHSMMMEFLLQHTKDKTIVMYVQRFLTAKAIKDDGTTVERTKGTPQGGVISPLLANLYLHEAFDMWMKEHLPNVQFERYADDVIAHCATEKQAQDVLEEIRERLLLYKLELHPEKTKIIYVGSGKDPENKPPRKFTFLGYEFKPRGYVKDKIWHMTFTPSIGAKALKAIQIKMDEWSLHSRTFSKLSDISQEKSAIIRGWIEYYGHYRRSELYKLAIRIDWKLVRWLKRKHKSLRSTDKAWQALRSVKKGWPKLFPHWHMIPTPPTRAV

SEQ ID NO: 690 - protein, 409 aa, synthetic construct
MIDYYETKQHPVTKKMVLDAYKKVRENKGSAGMDEQTLEDFKLKASTNLYQIWNRMTSGSYYPNAIKQVLIPKKSGGTRSLGVPTVSDRIAQQVVKSYLEAKVEASFHQDSYGYRPNKSAHQALDVAKGRCSYYSWVLDIDIKGFFDNIDHELMLKALKRYTQEKWILNYVERWLKVGVFNGNEVESREKGTPQGGVISPLLANIFLHFAFDMWMLKIYPHVPFERYCDDVIIHCSGKEQALLMKMAIAKRMKECKLELNEQKTQIVYCRNQIHKEKYEQVSFDFLGYTFRPRYCPTKKGLSLLFTPCMSTHSKNDVREKIRKVINRSFKGSVQQLAQMLNQKVRGWFQYYCQYNKYTTVGLWYWLNAKVINWVMENRHFGMRRAVRWLKTIYSTNPDMFIHWQLSHPW

SEQ ID NO: 691 - protein, 417 aa, synthetic construct
MIFKEQTKSVPITKEMVWESYKKVKSNGGSAGIDQQSLSEFDRVRSKELYKLWNRLASGSYFAPAIKRVTIPKAGGKTRPLGIPTVSDRIAQQVVKTYLEPRLESVFVDNSYGYRPNKNAHTAIQSVQQNVRRYSWVIDLDIQEFFENVNHELLLKALERHVSEKWVLLYIKRWLEAPVILEDGAVKVSTGKGTPQGGVISPLLANLYMHYCVDKWLEKFHPSVIMVRYADDLIIHCSSYQEAVRTLTDLKDRLEKCGLRAHPEKTKIVYCKKEGRNLNDYPVQFDFLGFSFQPMRNRLRNGGSFLQFDCKMSRKSKVRINGELRKLNFHNKTQRGIQDLAILLNPKIRGWVQYYGKISRRSLKPVFYYLHHRLIRWILNKYKSFKGSKVKAVKWLRQVTVSYPNLFYHWELGYKLV

SEQ ID NO: 692 - protein, 414 aa, synthetic construct
MTGKSYDIPKTLVWEAWLRVKANRGAAGIDAETIERFETKLAANLYELWNRMSAGSYFPPPVKAVPIPKKSGGVRVLGVPTVSDRIAQTAVKMWLEPRLDPLFHEDSYGYRPGKSALEAIAVTRRRCWDRDWVVEFDIKGLFDNLDHGLLMKALRKHCEEPWILLYVERWLTAPMQSADGRVQTRFKGTPQGGVVSPLLANLFLHYAFDTWVARHLPGVRFARYADDAVLHCKSRRQAEYVLDRIRERFPACKLELHPGKTRIVYCKDVNRTEDNPDIQFTFLGYTFRPRRAADKYGRIYVNFSPAVSRDALKAMRQTIRGWRVQLKNDKSLADLSAMFGPILRGWRQYYGRFHGSALESVWRRMNRALIGWLMRKHKKLARRKLRAAETLERMAKRQPRAFVHWSMGYLSSVG

SEQ ID NO: 693 - protein, 492 aa, synthetic construct
MMHGLEKSDLAVVAMKPANNAGSPAAEWVEPRAGTNGNADPPRTRRTQSRDSVSQGLERVRQAAMQRKRQAFTALLHHVNVDALREAFLALKRRAAPGVDGMTWQDYESGLEEHLQDLHARVHRGTYRALPVRRRFIPKPDGRQRPLGIAALEDKIIQRAVVTVLNAIYEEDFLGFSYGFRPGRGQHDALDALCVAIKGKRVNWVLDADIKGFFDAVDHSWLLRFVRHRVGDERITRLVGKWLMAGVLEDGHWSASDQGTPQGAVISPLLANVDLHYVFDLWAQQWRRREVKGDMIIVRYADDLVVGFEHEAEARRFWDAMRVRLEQFSLELHGEKTRLLEFGRYAIERRQRSGQGKPQTFNFLGFTFICGRSRRGAFLLRRHTRRDRMRAALRELKDEMRRRRHDSLTDQGRWLRSVVAGYFAYHAVPTNAHAIGAYRHHVIDLWRRSLRRRSQKDRMTRARMDRLAAEWLPPPHVLHPWPEDRFAVKHPR

SEQ ID NO: 694 - protein, 515 aa, synthetic construct
MQTALWESDQPIVPKKRGNARGGKELAGARWTGGEPPPIPRDGHGVSPKLRSITLRAREDPTCKFTSLAHLLTADFLTECFRELKKNKAPGIDGVTVREYEAKLDENISDLVARLKAKQYRPQPVKRVYIPKPNGERRPLGIPAIEDKIVQMALKKILEAIFEVDFCEVSYGFRPNRSCHDALDMVDTTIMTQPVNYVVDMDIAKFFDTVDHECLMECLRQRIADPSLLRIIARFLKSGVMEDGVFQEIDRGTPQGGILSPMLANIYLHYALDLWFEQEVKKQLSGFAQLVRYADDFVVCFQYRSDAEAFGAALRERLAKFELKISEEKSRIIAFGRSACQQARKQGKKCATFDFLGFTLYCDKDRNGNFKVGRKTASKKFRQKTKEMNQWLKGTRNRVKLGLWWPLLGRKLVGHYQYYGISGNIKGLQSYYHHTVRLAFKWINRRSQKKSYNWSQFNKFLARNPLPKPKIYHFYALSKRRGCAPEEPDEGKLHVRFCEGAHSHLGASTPTRGRL

SEQ ID NO: 695 - protein, 448 aa, synthetic construct
MQPVKETSTGHVGSGKCWQTSLRGIAKKATENKTHQFGNLYQLLNKESLREAFYDLKKKAAAGVDKITAEEYAKELESNLGELEEQLKSKQYRAKLVRRVYIDKGNGKKRPLGIPAVSDKITQRVAARMLEAIYETEFSAHSYGYRPHTGAQKAVKDLTKELICGKYGYVVEADIRSFFDAIDHDWLIRMLEVRIADKAFLRLIKKWLKAGVLDTDGMVKHPVTGCPQGGVISPILANIYLHYALDLWFEKRVQQSCEGMTYICRYADDFVCAFQFKQEAVKFYKELGERLEKFGLELAQEKTNIIIFSRFRQEDKTKFEFLGFEFRWGVSRKGKAIIKRRTAPGKLRKSIIAFTEWCKKMRSKRLRKLFPKLIAKLRGYTNYYGLIGNFRSLSKFYEHVKRIFYKWLNRRSQRRSFNLAEFDACWERYGVPKPRIVESDLVQLHFDF

SEQ ID NO: 696 - protein, 439 aa, synthetic construct
MSGSPNLGSISTRLRRIAQLAREDPERSFMSLAHYIDEYWLQEAYSRTRKDGATGVDGTTGKQYGEQLGDNLRSLLDRFKSGQYQAPPVKRVHIPKGTGDQTRPIGIPTFEDKVLQRAVAMLLEAIYEEDFLACSYGFRPGRSAHEALRDLWRELMGMGGGWVLEVDIRSFFDELDHGHLRGFLDRRVRDGVIRRAIGKWLQAGVLEEGHMRHPVTGTPQGGVISPLLANIYLHEVVDRWFEEEVKPRLGGRAVLIRYADDLVIALAEEKDARRVEEVLPKRLARFGLQLHPDKTRLVRFQAPRDEEKPPRSEGPGAFTFLGFTHYWGKSRKGNWVVKRKTAASRFTRSLSRVRQWCRRCRHEPVAWQQRQLSRSLRGHYAYYGITGNFRSLTNFHRQVTREWRKWLNRRSQKARMIWERFNRLLVEYPLERPRIFHAI

SEQ ID NO: 697 - protein, 491 aa, synthetic construct
MMHGDGKSDRPVVPGKPPNKDGRRGPRDHGVPYTGTKAEAPDTAKGTPTEAKARGGPTAEGVARRDRKLRFTALLHHVYDPEMLREEYFCLEREAAPGVDRVTWRQYGEALEDNLHDLSARLKRGTYRAKPVRRVFIPKADGRPRPLGVTALEDKLVQRATVEVLNAIYETDFLGFSYGFRPGRSQHDALDALYTGLLTKKVNWVLDLDIRGFFEAIDHGWLVKFVEHRIADRRVVRLIQKWLNAGVLEDGKRTRSEQGTPQGGSASPLLANVYLHSVFDLWVQRWRRTQARGDVVVVRYADDAVVGFQNESDAKRFRAELAERLSEFALELHPDKTRLIEFGPYAASNRKRRGQGKPETFDFLGFTHICGKKRSNGRFTVLRQTIRKRLQAKLKQVKTGLRRRLHDPVPEVGRWLRSVVGGHVRYYGVPMNGPALHLFRFQVGRLWYRSLRRRSQKARLTWERMRRLIDRWLPPARVCHPYPLRRLGVIT

SEQ ID NO: 698 - protein, 441 aa, synthetic construct
MNLSTPESVQKLQTALHTKAKESPDYRFYCLYDKVYRADVLAHAYHCCRANGGAAGVDGQTFESIESGGLDTWLGELAKELRDKKYRPEAVRRVYIPKPNGSKRPLGIPTIRDRVAQMAAVLVLEPIFEADLEPEQYAYRRDRSALDAVKKVHSLLNTGHKEVIDADLSGYFDSIPHAELMKSLARRISDRHVLHLIKMWLEGPVEESDERGNKHRTTRNKDEGRGTPQGAPISPLLSNLYMRRFVLGWKALGHSKRLQAHIVNYADDFVICCRGTAQSAMQTMTDMMVKLRLTVNEAKTHVCRVPDESFDFLGYTIGRCWSTRTGQPYIGTRPSKKRIARVCETISELTSRRWLLLDVDERVRRLNRTLIGWANYFCLGPVSKAYRAVDAHARYRLRQWLRAKHKVRGAGTAQYPDEYLYATLGLVELARRTRDFPWAKV

SEQ ID NO: 699 - protein, 436 aa, synthetic construct
MIKASVGLQDLRRRIYVKAKAEPSWRFWGLYVHVCKMEALFLAYEMAKKNDGAPGIDGVTFAAIEAQGVAAFLEQIQDELIGRTYVPLPARKQEIPKDGGKVRILSIPAIRDRVVQGALKLILEPVFEADFQAGSFGYRPKRAAREAVSRVAQAIAQYKTRVIDLDLRAYFDTVRHELLLKKVAQRINDNDVMHLLKVMLKASGKQGVPQGGVISPLLSNLYLNEVDRMLERAKVVTRSGQYTYVEYARFADDMVILVDAHRRHDWLMKAVEKRLREEFAKLQVEINEEKSSIVDLSRGESFGFLGFDFRRTRSLKGVWRPYYAPKLKKRTALLQKLKEVFRSHQSQPVDRIVHLINPILRGWVNYFAIGNSSQCFNYIQDWVEKKIRRHLMRSRKRRGFGWQRWSRQWLYGGLGLFDGYRVSRAWSKATSAEQVS

SEQ ID NO: 700 - protein, 429 aa, synthetic construct
MQELPNIDRIREFQRKLHEKAKADPKYRFYSLYDKAYRMDILEEAYRKAKANGGTSGVDGETFDDIEAKGVAEYLTVLQKELKEEQYNPKPVRRAYIPKPNGKKRPLGIPTVRDRIVQGAFLLILEPIFEADFCDSSFGFRPEKSAQDAIREIYKYLNWGCEKIYDVDLEQYFDTVEHWKLMKLLALRISDGKVLHVIKQWLSCGYVEDGQHRQSKRGTPQGGVISPLLANVYLNPVDRAFERNGIGTIKQGSIHLVRYADDMVILAQKNLEKGITLLDSYVDKLGLRLNKEKTRRLDLPTDKKVKFLGFQFHRVTNRKTQKRLILVSPSPKSLKRCREKVKTLINHSNPMAVREQIERLNKYLSGWTNYFRLGNSAHALHQVRYYVNQRVRRLIQRHKGREGYGWKNITSADLYGRLGLFCDYKVRWL

SEQ ID NO: 701 - protein, 465 aa, synthetic construct
MSNRLDQPANVNESDHERTRLRARDVVRDEGISSLQALQRVLYRSAKQDPTRRFHALYDKLTRSDVMWQAWINVSTNQGAPGADGVSIDAVTAGGYEGVTSFLDELSTEVKAETYRPLPLRRVHIPKAGKSGETRPLGIPSLRDRVLMSAAKLILEPIFEAQFSSTSFGFRPKRSAHDALEVIRQSANSGAHWVLDADIKSCFDEIDHEALMALIERRVSDRAMLKLLRSWLRAGIIEGGVYSDSDSGTPQGSPISPLLCNIALSVLDEALAKAKSQTGSVVRYADDWVVLCATKKRAETARSIAEAALAPLGLRLHPEKTRIVHLTRGTEGFDFLGFHHHMVESWKWPGRYYLQRWPSDRAMASIKVKVREMTDRRYVGLSLDDVVDRLNPVLRGWAGYFRRGNSSRKFNVIDSYVAERMAILASNKYGLSGRNWGTRFSYEWFKSLGVYALSGKVISRTAHAQ

SEQ ID NO: 702 - protein, 455 aa, synthetic construct
MQPLDPEVHYGISDRCYLDRHEVPMDLLPDKLHQLRWKLLQKAKKEPKFRFYALYDRVYRIDVLEAAWKHVGKRGKACGIDGVRAEDILERENGVEDFLATILDELKSKTYRPSPVKRVYIPKADGKKRPLGIPTLKDRVVQMAVVLILEPIFEADFHDCSHGFRPGRKAHDALDAIRENLKAGRTEVYDADLKGYFDTIPHDKLMACVRMRVTDRSVLGLIRGWLRAPIIEEDDKGNRQPPLKSEQGTPQGGVISPLLANLYLHWFDKVFHRPDGPGTWANARLVRYADDFVIMARYQSARIDEWISHRLEDWLGLTINREKTSVVRLKRGESLDFLGFTFRYDRDLYGGTHRYLNVVPSKKSLKKARDAIREKTGPKMCYKPTPAVVRDLNTYLKGWCGYFKYGYPRKSFRDLGQYCRCRMTTHLNRRSQRKYHRPKGMSSYQYLQEIGLLRP

SEQ ID NO: 703 - protein, 567 aa, synthetic construct
MNTPTEWCRMQVSELQRRLARKATDKPEHRFTKLYDLLTWEPLMAWAFDKLMTNAGSRTAGIDRMDKRKALHNRDLIIAELRVALKSGTYKHQPVRRVFIPKANGKRRPLGIPTLTDRMVQMMVKAILEPIFESDFRPESHGFRPQRSCHTALAHLHQLTAPRQKKMNWVIEGDITGCFDHIQHTTLTRLLRRRLQDHKLMGIIWQMLQAGVMEGTLFTTTSEGTPQGGIVSPLLANIYLHELDLWFHQNYTGLNYNEKNRRRKRKEGNAFYVRYADDFVVAWNGTREGAEQLKAALTTFLREHLGLELSAEKTRITHVTDGYDFLGFTVKRYRNRSGGSTLITRPSEKSVMKLKVKIKTMTKHGTTRDAVRDKITAMNYLTRGWANYFRHSAASGTLRYVSHYAFKRVEIWLRAKTRQGSKAIYGSYYRRDPHGHLTWSAGGQHLHLPTYTKIERLRYAHRPNPYLTEPEVSPLTHNEAPFGTKEWGGAHYYGEGWTEIRAAVLERDERTCRTCGKKGKVEVHHIRPWKPGMAHELTNLITLCGTCHRQVRDPKSEVNRQLARMTP

SEQ ID NO: 704 - protein, 518 aa, synthetic construct
MDMDRQADEAWILSVQSKLYQWSQANPGDQWRDMWSWLTDIRTLRCAWQRAASNRGARTAGVDGMTVGHIRANKGEQRFLEKLQAELRSGAYRPSPSRRILIPKAGKPGQFRPLGIPTIKDRVAQGAVKLLLEPIFEAQFWHVSYGFRPGRSSHGALEYLRRAALPQKRDQDNRRSRLPYPWVIEGDIKGCFDHISHHHLMNRLRARVGDHRVTRLVVLFLKAGVLAEDQFLRTDNGTPQGGIISPLLSNIVLSAIEERYERWAYHRTKLYPHRKRDGVAAAASARGADRKAGRCVFLPVRYADDFILLVAGTKEDALAEKSALADYLLETTGLELSPEKTKVTALTDGFEFLGFRFGAHWNKCYGFGTRVEVPKAKAADLRYRVKQLTRRNTTLVSLGEKLKEINPILRGWANYYRYCAYAGDVFTSLDWYVGDRIWHWLRYKRPKASAHEILASRRPSQLRRTRKVWQDGSTEQFLLSLTPVCRYRLAWLGKPNFAMSSGEPDAERKSQVRFGKRR

SEQ ID NO: 705 - protein, 520 aa, synthetic construct
MTPNGVTPWPSLEEARTRVLGIQRKLHRWTKDDAKRFDDLFNLTFDRATLLVAWSRVRGNRGSGTAGVDGVTRWHIEHRIGVERFLEELREALKVRSYRPQAVRERGIPKPQGKVRYLGIPTIRDRVVQMALKLVLEPIFEADFCPTSYGYRPARRAQDAIAEIAHFINPPSTYEYVIEGDIRACFDNVNQGILMRLVRERIADRKVLALVNAFLRAGMMKETGGFRATLTGTPQGGILSPILANVYLSVLDRHFERAWKYQTRYIECTTYYRRRGLATYRLVRYADDFVILVRGSREQAEAIREEVARLLWDELQMELSAEKTCITHVDAGFDFLGHRIRRVQWRGKSVAVTYPSKKSLEAVKREVKSLTTCWTRNLSLRVLLIRLNPVLRGWSTYFRYDASKRTLAYVDHFAWWRVFRWLRKKHPQRSVKYLRRRYTGGRWQIQEEDVELFRPSRVRVERYRYRGRRILVPWMEPEELGRVGRYGSYDFDECALLERLQEALASAEQTTVLCGEPDAR

SEQ ID NO: 706 - protein, 491 aa, synthetic construct
MDGDTSVNTGVVAWPEDDAAWLSVRRMQLKLHRWASEDSARRFGDLFNLVYDPAFLVHAFERVAGNDGARTAGVDGVTVAQIETRVGVGVFLGQVRDSLKSGEYRPSPVRQVKIPKGGGKLRSLGIPTVVDRVVQAACKAVLEPVFEADFLPCSYGFRPNRRAQDAIAEIHHFTSRPADYQYVSEADIAACFDEIDHVAVMDRVRRRIGDKRLCALVKAFLKAGVLNDLGDREESLTGTPQGGILSPLLANIALSALDEHFTRQWDTDTGMLGSPARRAKRKRDGLGNWRLVRYADDFVLLVSGDRHHAEALREEVSAVLTPLGLRLAPEKTSVVHIDEGFDFLGFHIRRMRKRGTNKHYVYTTPSRKSVQKIRDRVRNKTYRSTLNMDLDELIAGLNRSMRGWANYFRHGVSKATFNTVDNHAWLRLVGWIRRKHRNTSRKQLRRRFCDQGWRIAHNGVVFTGASSVAVTRYRYRGANIPTPWTQAATSS

SEQ ID NO: 707 - protein, 476 aa, synthetic construct
MNTDESEHALYEAERRVLEIQTKLHRWAREDSHRRFDDLFNLVADPAFLLVAWARVRGNKGARSAGVDGETAYYVEAVRGVEVFLDRLRTSLKDRSFCPLPVRERMIPKAGGKLRRLGIATVTDRVVQASLKLVLEPIFEADFLPCSYGFRPKHRAHDAVAEVRHFTSHSYEWIVEGDIKACFDEISHLALLDRVRARIGDKRVLALVKAFLKSGILGEDRVLRENDAGTPQGSILSPLLSNVALSVLDEYIAKGPGGPGSTFNDRIKRRRRGLPNYRLARYADDWCLMIHGIRADAEVLREEIAGVLAPMGLRLSEEKTLITHIDEGLDFLGWRIQRHRKRGSNRYYVYTYPARKALAAVTDKVKAQCRKTGTDLPLDALLICLNRMLRGWCAYFRPGVSSTAFQYLSSYTWGRVIHWLRRKHPHMNWKELRRRFCGGGWWPASEERELFNPAKVGTTRYRYRGSVIPSPWPITG

SEQ ID NO: 708 - protein, 620 aa, synthetic construct
MAKGGSYINSILLMENVKYIMTNPEIILNNLVKHSKISGYKFERLYRILFNEQMFYQAYQRIASKKGNMTSGTDGKTVDGMSIERIERLIASLRDETYKPHPAKRVYIPKKNGKKRPLGIPSFEDKLVQEVVRMILEAVYEGYFESTSHGFRPRKSCQTALTSIRNTFLGTKWFIEGDIKGFFDNIDHNVLIETLRERIKDDRFLRLIRKFLNAGYIEDWKFNNTYSGTPQGGIISPILANIYLDRFDKYIAEYIQKFDTGKTRPKNREYRIYSDRKRRLLAKFNAETDADKREEMAQRLKEYSRLMYEHPSVDEMTPTYKRMKYVRYADDFLIGVCGSKAECEIIKNDIAMFMKEKLKLELSDEKTLITNAKDRALFLGYEITVRQSQSTKRDKNGMLKRMFNGKVILLLPREVARKRLLSYNAMTIIQVNGKEDWKPKSRGAMNNCKPEDILAKVNSEIRGFYNYYAIANNISTLGKRFGYVMSYSFYCTLAQKLNISYPKVIKKYREGKDCVIRYTDAKGRERCRMLYNGGFQQKEPTADAKCDNLPNPFVISSPSLVERLKAEVCELCGAKGKTVMHHVRTLKTLTENTAWERAMLQMHRKSLAVCPNCYAHIHDD

SEQ ID NO: 709 - protein, 975 aa, synthetic construct
MLEVKVSNRLTCLTTISGPANVVCPIDSGILFHRYYVFISINTPLHSTPMRVCSFFNACSKKRSNCFKAAIRGFSSDLSSSEDKDRTVVSVSSKECFLPVPSRKADMSLSVQSIPSKLSNNHVEGSTDVVDSLRQLKPEKDGIYTRITTRFLANPEFLKLAYAHIKNKEGNMTSGGSNSNIILDGISQKWFEDTALRLKNGTYEFSTSRKINIPKKGSLKLRPLTIGNLRDKIIQKAIQLVLEEIYENKEKIFSDASHGFRPNRSCHTALQQIKNEWTAIPWFISIDIKDAFGTINRDILISCLKVKIRDQRLFEILLKMLQADIISINGIWKEFYGVPQGNILSPILANIYFHDLDVYIDKKIINRYKKGTKAARCLDYQRAVSFTNEEKKASLQKRKQLARRKRRDAHKAGLRYTKIDGSFIRVKYVRYADDFLIGVRGPKTLVLKIFRSVIFFLKSTLQLNLNEEKSKIIDSFSNKISFLGMLIHNVSTKKLPFRKSRALQNKKRKLTRVLLRADALENQRTKKLKDECLKLLRNSYKSSRKDRKPLKEDFISLIKGSPVFGDVIKNSNRAIYREFIQSLLLVSDIQENHTLKDFLNLWEKELSLDTEKFKNENSPTRPITKSETIRRIVEILKVQHNLPAQEVQWFQLFKGANKARGSAWKPVWIDKFSLSKNAVSKLKLPVNNIYHVKYNVENIRLVIEDLLLQAEQRPSKTYIDHIPNNNAKSVRQTWDEEGVFTSLPPQINSDTSEIYKRLKEASIINSKKKPICKNSLLAAEAWLIISYYNTLAHGLLSYFRCVDNFNTIKKIVTYHLRYSLLHTLAHKHKCSIKKVLEIYSKEIKTNGRQGKVVSFINSIAVTNLKKDFLFKDLRNPYSNLTKSYISLQRGAISANKCAVKNCVETDNIEVHHVQKLFRNIDRTGKVVIQGIAKKLSGRLAMESALKRKQIPFCPKHHKDWHNGVISKIDLDEPWV

SEQ ID NO: 710 - protein, 854 aa, synthetic construct
MRDVNNGWLVRYLHSNTASAFFFLVYLHIGRGMYYGSYRAPRTLVWAIGTVSAPKGRYFGSVPRRLFKSGIDSIQFEYRMPLPGMWLITLSFGIAGGRCSMVRILFNLQLTASGIWHGKDNELDTIKHHRPRGNDHNRSCHHFDGVLRVIWLAHGETTTPSATSRRFNCCKCLNQKVTNLSLLRDRTAYAIGTRRRSFHTRGRVERPQQDSKGSSFNQEILETKVLEQRKAAGLTSSKVRKGGKRAALVTLVRKELQLYLDKRGSYNGLINILKNPEYLVACYESIRGKPGNMTKGSTKETLDGLTWEWFVKLGESLAKGKFDFTPARRVMIPKANGKLRPLGINSPREKIVQKALAVIMEQIWERIFLNSSHGFRPNRSIHSALKELYLEGGNYNWVIQGDIEKCFDAIPHSVIMNRVQKIIKCKRTLELIKKSLDAGYIDPDTKKTVNSDLGTPQGSVLSPLLCNIVLHDFDAFMSSMREEYNFGEKRRPNPDYVKLNSKRRYIRDIRERRKILREMRQLLASDPMDPNFKRLKYIRYADDFVILIIGPLGDAEKIKERIRDFLLNKCGLTLSLEKTVISNIQTEGFKFLGAECRRASMTKNHVVKHKDRTIRATTRLRVNIDLTKVYKKLVSIKVATWDNKNLQVPRGTANNALINFSHAEIISWYNSKIQGIQNFYSFAGNRKRLHLVFWILASSCALTLAKKHKMSSMGQIFKKFGRNLTCPETDVSLVRPSALEAIHDYKSNNVPDNLDFLDVTWAAKLTESNIGKSCFLCGSTKDIEMHHLKSVKDVKQKIRNGNASFSAWKGAFLRKQIPLCSYHHDLYHGGKLNYADLKQISSFTKLPDSPSDNK

SEQ ID NO: 711 - protein, 579 aa, synthetic construct
MKEKEDRKLLSSKDIISKDITYELLAIIKNKGNNRYGYLLKFISNVDVLLSSFEHIVRKDGYYSKGSDKQILSNVDIKYFENLSRELNSGSYKPNPSRRVYISKPDGSKRPLGISCSRDKIVQQACMIALSYIYESIFLENSHGFRPYKSCHTAINYFKLHFTSTKWILNIDLKGCFDNINHQKLISIINENVDDKGFEILYWKMVTAGYIYRGTHFKTIEKGTPQGSILSPILCNIFLNKLDIYLLDLKNEFDKGTEKRKNKSYRKLAVKEARKQFITSRDQMDTNFKRLNFVRYADDFIIGIDGSLSDAQLIGAKVEKFLKGELLFEIKRFTIKNFCQEGDNFLGFTLKGWTTKSRKIINTKKGKQLVNHRPKVLIPTTKILNKLHEIGLVKKYSNHFRGTAYRKLVEHPLYNIVEYFNSVYRGIANYYCIAYNINTLRNLNYILKVSCCLTIALKMKLFTVSKVLKKYGRNVTINENDSTIKFISYRKLKKPYFKSIEPFNLDNIIKFFSYGLRSKLKTNKGCENCGSSLNLSLHHFNPVRNINPKLKTLEKIKIKVGRQQILLCRECHNKLHSAK

SEQ ID NO: 712 - protein, 834 aa, synthetic construct
MRKHKRIHFGVFLNIRSLMICESSLLAITMLLTDRRATVRFLWKLRLLINHNLLNSGMFQNTEILTWHYSSTDAGDNSLYLTGVSDLGTVKAYPLRKVTNQVQWVIREGETLAGPVDRSSMPTLTSCQALAIHLETESFDADLPIPKVDQLVFNKKSSEAKPHLSFMPSIAIPVNLQNHKKKMRRGRGAVVPNTMGRALCGLSFTQDRSLSTKTFQSDVSQGRIPNTMIKRLETLSKLFTHNPDAQADGLMRILKDSQIWVAAYIKLKTNPGSMTEGGDKGTIDGTSLKRLLMLRDSVLDNTYLTGRARRKNIPKPQGGTRPLGIPTFRDRIVQEVIRSILETIYEPVFHKTSHGFRPGLSQHTALRDIRKNFRGASWFVEGDISKCFDKVDHTILIRLLRKRIADEKFLSLIKKILVNIVKEEDNTETVSIIGTPQGGICSPLLSNVYLHEFDLFMENLKENYDTGTHRRRNPEYDRRYRKGGVQEARKVSYGAPNDPYFRRLGYVRYADDFLIGIIGPIREAREIREQIRQFLKDTLNLELNMEKTKISNPSSHKIKFLGYVLGKSGRNAYTYIRKYQGTKRKIRVIRGGSPYLKVDTQKVIKALAQKGFCDGKGFPKPNFYYLPEPQTTVIRKYTQILRGLERYYHLADNKRQAISKFNYILRYSAAKLFAAKYKLKSMSKVFALGGKDLSKPIKSKNAIGITDSALAEMEETVTNKPSRRRTQTLKGLPFTKYSTISKPDIGVFTKYKNNHPFSNPLESLTWRTIRGVDAFKLPCAICGAENNVEMHHIRQLKNLKGKDLIEKKMISAMRKQIPLCRKHHLAAHGKKMYK

SEQ ID NO: 713 - protein, 825 aa, synthetic construct
MHIIQDLEDRHNHLNNTNLKSSISMWYERWFLSTNAKDIGTLYLMFALFSGLLGTAFSVLVRRCAKLLLNDPFILHSSNMLTTSGLVGLERVPMNIACLSKALSIWNQVWESMRVVVPMVKTTLFKLYLKGTSRKGSKLAWNRLCILIEIMYVRILIRCNITQITCSNKREEGEPKGTIGNNYELRDHLRGRSSLLYGDGDFVVGGKTPKGVRMFSSKGVKEGSGVRPDLNQSELPNKFTKLIDISSNKVNNMKFNDLYTLMFNMKMYEVAYHKLKSNPGNMSPGIDQITLDGISQEVFQNIILTMKDESFKFKPGRRVDIPKANGKTRPLTVASPRDKIVQEVMRMILEAVFEPTFSNNSHGFRPNRSCHSALRQVKTQFGGASFFIEGDISKCFDSFDHDKLIELIRERISDERFIRLIWKSLKAGYVQFHRTKLSIIGTPQGSIISPILSNIYLNKLDLFMDKLKDDFDQGKSAKINPIYKSLDYYRQKALKANDQLGALKYLKEMQKIRARLPKDDNFKRLYYVRYADDWIMAIRGPLSETTRILESTREFLRKELNLDLSKEKTLITNPHKDTAMFLGTQIRISNHTYFYRGPNGQTIRAVSQLIFTAPIDRIQKKLADAGFWDNANKRSVPRMLWYHENKDAIIILYNSVIRGYLNYYSFVSNFGRLAATVEWILKSSCTQLLAAKFKLGTTLKVIDKFGEDLKGSDNIALLKPSYRKNTWDFKLNNSYVNLKALYAKGISKASLDGLVCSKCESDVQVEMHHIRKLADLNPKLSEIDRIMASKKRKQIPLCRACHIDHHKRSFLDRTRSKSLIRKIIK

SEQ ID NO: 714 - protein, 694 aa, synthetic construct
MRVEKNQYQELSLTAIIIRDVISMTKGVLRVNIPVVTVTVGLPKSRKRYGNGGLIVAGIKTQVFSNTSKVMFRECEVTQRRGLTTSNLVMGHKKLVQDLNNNFYKDKICNPTKLIQAYELVSSNKGSNTKGIDSETLDSYSKDTIHSVSKSLKDHSFKFKPIRRVEIAKSNGGSRKLGIPSPRDKVVQKVMAMALEEIYEPKFSNSSHGFRPKRGTHSALKSVTRWSGTKWFIEGDISTCFDTLDHHILETLLKKEISSKPFIDLYWKAVKSHYINPVNKVEEFSNVGVPQGGVLSPILSNIYLHELDKFMQTKIEESKKSGPTSIDNPHYKKVHTKISNMRQYFSPTYRRNRSLTKEQEQERLKEILKLEKVRTKLSSTIQGPGYRVYYVRYADDFLIGINGPRRIGEKLKQELQTFLLNELKLTLNLEKTKVTRSDHGACFLGARLKRHASRTNDQKRRTSSVTRTGRKVRARVPQGNIIALAPLEHLIRKLQSQGICKTRNLKKHDVIPTRKTAWTNLNLVTIVQKYNNVWQGLLNYYSFAYNRCQLNWIQYLLHHSLACTFMNKLKLNSRRQVFKKYGKTIQVKDESGKLVAFKLVKSLPRIGKFSNKILPSGFETFKYSLRTQSVFDKACKICGTKRNVEMHHRRPLKAHKTDNTLKSIQINQSRKQIPLCASCHQRVHNGLYDGPGIY

SEQ ID NO: 715 - protein, 601 aa, synthetic construct
MQEIETVLNVIQNRGKQGKSLERLYRQLFKEELYEKAYAEIHANEGAITKGSSNDTLDGMSQKRIAEIIQKVRTTTYRWNPVRRTYITNEDGRKRPLGIPSGDDKLLQAAMKLLLEAYYEPQFSKRSHGFRPGRGCHTALKQIRESHRDTSWFIEGDIKGCFDNIDHETLLGIMEEKIRDQRFLNLVEYLMKAGYMEDWKWYGTYSGTPQGGIISPLLANVYLDTFDKWVEEELLPHYNFGSQKEKGRKRNPEYRHYEYKRSQAKKMGDVEAYERYGKMMKNVPSIIDDDSYRKLEYIRYADDFLLSFAGPKKEAEEIRERISEYLERELNLELSIEKTLITHARNDKARFLGYDLCVMQSDERRTANGTIWLGVPREVRRKAMRKYTKKGKAVHRPELLLNSDYDIVARFQAEYRGLVQYYQMAHNVHRLQEVEWVTGTSLLKTLAGKHKTSVNKIVKKHKSTRTVNGKTYKVFEARAERKGKEPLTTHYGAVPLIRKPEASITDRIVTLGKGRVELLQRLSNDECEMCGEKGNIEVHHVRKLRDVNKPGRKNKPAWVHRMSALRRKTLMTCVNCHDAIHAGKHRSEWDNWKIVLESRVR

SEQ ID NO: 716 - protein, 591 aa, synthetic construct
MQSAEVVLGVLRERGRKGLPCEQLYRQMFNKDLYLLAYGNIYSNSGAMTPGASEETADGMSEEKIEQIVEAMRCERYRFAPARRTYIPKKNGKLRPLGLPSWSDKLVGEVVRLLLEAYYEPGFSDLSHGFRKRRGCHTALRKVHDTWTGTVWFIEGDISDCFGSLSHEILLGILAEKIHDQRFLRLIRNMLKAGYLEDWEYRETLSGCPQGGVVSPILSNIYLHKLDEFVEQELIPQYTRGTGRKVNPVYKRLHRHMTSARLRGDRAAVRDLKKQLRAIPYGDPMDPGYRRLKYIRYADDHILGFIGPKAEAEQIKARLAKFLRETLGLELNQQKTLITHARSQPARFLGYHVRVQHCNTKITGGQRSANGNIALRVPPDVIRSQCARYRKHGKPWYRSRLQNLDDYDIVRTYGAEYRGVINYYLLAQDVSRLHDLQWNAETSMLKTLALKHRSTVSKMAARYKAKIETSDGLRTCFEARKHREGRKDLVARFGGIILRQNRRAVITDPASGPPLYPRKELTRRLRKRECELCETGTTVAVHQVTGLKDLGKPGAGQPAWATLMAKMRRKTLIVCAPCHDWIHANPVAHAA

SEQ ID NO: 717 - protein, 594 aa, synthetic construct
MKPTSEILERMNRNSGEHPEGVYTRLYRYLLREDIYMTAYNNLYANNGAGTKGVDDDTADGFSVEYVQQIIAELKALNYSPKPVRRTYLKKKNGKLRPLGIPSFKDKLVQDAVRQILESIYEPIFSDFSHGFRPDRSCHTALKQASKYFRGTKWFIEGDIKGCFDNIDHTVLLNLLSEKIKDSKFVTLIGKFLKAGYMESWEYHKTYSGTPQGGILSPILANIYFHELDKKVEQLRADFSQPNPKSCSLEYGRIRREILKKRKQYGELTDDTQKKSLLREIHKLETEMRKLPYKDATGRKIVYVRYADDFLIGVSGSRKDCEKIKQELTAFISEKLKLELSDEKTRITHSSENARFLGYDINVRRNNQTKRTAKGTVQRTLNQSVELLVPFEKIEQFMYQREIVIQAKDGSLIPWQRDAMAGLTDLEVLDTYNSQTRGICNYYSLASNFSKLTYFVYLMEYSCLKTLAKKHKTRISAIKKMYQCGSSWGIPYETKSCKKRMMIIKFSDLKKGVVYQNADIIKHHIHFTNHSSLEDRLRANQCELCGATDVPLEVHHINKVKNLNGKEQWEKAMIARKRKTLIVCKNCHIAIHHS

SEQ ID NO: 718 - protein, 596 aa, synthetic construct
MKPTMEILASIKENSSKNSEEVFTRLYRYLLRQDIWFEAYKNLYANSGAATNGVDNDTADGFSKEKIDKIIASLADETYKPKPARRTYIKKANGKMRPLGIPTFTDKLVQEVLRMVMEAVYEPVFLNCSHGFRPKRSCHTALSTLKKEFTGAKWFVEGDIKGCFDNIDHAVLVGFINQKIKDARLIKLIYRFLKAGFVENWQYNNTYSGTPQGGIISPLLANIYLHELDKFVMTLKSEFDKPNETVRTKEYNRLFTQRVKLKKLIDCADGEEKQDLLKQYKQVRAEMMKTPYTPQDDKKIKYIRYADDFLIAVKGNREDCMEIKRKLAEFISGTLKMELSDEKTLITHSSEKARFLGYDVSIRRNSSIKPHGKGRPTQRTLNNKVELLIPKDKISKFLFSKGIVRQKKCDEMFPISRVPLRNSTDLEIITIFNAELRGICNYYSLASNFSDLNYFNYLMEYSCLKTLATKHKTRITKIKEKFKDGKGSWAIPYETKSGKKLMYFAKYTNCKGANATDTVTKAAVTIGYNRNTFDKRLNADICELCGKTGAGNYEIHHIHKVKDLKGKELWERAMISKKRKTLVVCHQCHQNIHHPK

SEQ ID NO: 719 - protein, 568 aa, synthetic construct
MDYTESDFDAASPDEVSEWHSIDWKAVQYFVGKEQSKIAQAEQAKDFRRVKRLQRNLTRSWQAKALAVRKVTENQGKRTSGVDRELWDTPQKKWIAVSRLNLHGYRALPLKRVWIPKADGKERPLGIPTMRDRAMQALCLLAMEPAAECHADPNSYGFRKGRSTHDARQQLFVCLSKKVSAQWVLDADITGFFDNINHDWLLANVRMNRRVLGQWLRCGVVDKQQLQKTEAGTPQGGIISPLLANLTLDGLEAGLMRFLKDQLGFEKAKKAKVHLVRYADDFVVTGDSKEVLETVVRPWVEAFLRERGLQLHTGKTRIVHINEGFDFLGWNFRKYSETLLIKPSHKNVKAFYSKVREVIAGHLSQPKEVLIAKLNPILRGWARYHQGVVAKATFTKLDHQILWRLRRWGMRRHPRWTRGKVFKHYWTHTSGRWEFEAKTRNRWDEEMQLRLYTLADTKIVRHKKVIGEYHPYDPAWEAYGEGLKRNRMVQSVWSGQRLELWMTQNGKCAHCGTDMDHEDSGLDNHHIVPVRWGGTDSLSNRVLLHPWCHRRIHALGLEVAKPVPVRGL

SEQ ID NO: 720 - protein, 493 aa, synthetic construct
MNVEQSMCAASGPAMQWEQIDWSRCEQKVRRLQARIVKATQEGRRGKVKALQWLLTHSFSGRALAVKRVTHNKGKNTSGVDKAIWRTPASRYKAIDTLRRRGYQPQPLRRVYIPKANGKQRPLGIPTMKDRAMQALYLLALLPIAETTGDLNSYGFRPERSTADAIEQCYKVVGMRHSAQWVLEGDIRGCFDNISHEWMLDHIPTDKEVLRKWLKTGYMENRKLFATEAGTPQGGIISPTLANLTLDGLERLLKQTFRNRQVGEKHNPKVNFVRYADDFIITGSSKELLENEVKPLVESFLLERGLQLSPEKTCITHIEDGFDFLGQNLRRYGRKVLTKPSKKNMHAFLEKVRGAIKRNSTAQQANLIGILNPIIRGWANYHRHIAASSAFGKAEMAIWRSLWSWAKHRHWKKPTAWIANRYWHRLGNGRRMFAVMAGSNAPKSRAMVAWLVNPAKTPIRRHIKVRSNANPFDPNWRSYYDARKSLKRASSQQ

SEQ ID NO: 721 - protein, 523 aa, synthetic construct
MLKEERQMTQLGNFKIPKSGASSTNKLNWQSINWVKVKRDVRRLQMRIAKAIREKRYNKAKSLQWVLTHSLSAKLLAVKRVTSSSGSRTAGVDGKICASNKDKMQLALSLRRYGYNAQPLRRDYIPKRNGKQRPLGIPTIKDRAMQALYLLGLEPIAETLADPNSYDFRQQRCTADAIEQCFKVLSHKTSAQWILEVDIEKCFDRINHNWLKENILMDVSLLNQWLESRYIERKQLHPTLAGTPQGGIISPTLANMTLDGLEKAIKSVAKPASKVHVIRYADDWVVTGNSQEILENKVMPAIEKFLKVRGLTCSREKTKIVHIKDGFNFLGFNIRKYHDKLLIKPATKHVHAFLKMVRNITKASVSLPTDILLRVLNPKIRGWGNYYRHVVSKDVFCYVDNCIYLAIARWARRRHPQKPAHWLRKKYFRQQGMRNWIFSTKVYDKKGKIVNRDLVQLKYLPIKRHRKIIAEATPFNPEYIEYFLKRKSYQGLNWLYRSLQKQAKSFSRSAKLQNQNSRIEQES

SEQ ID NO: 722 - protein, 461 aa, synthetic construct
MKLTYKQAIRPFARGPPLRLVQSHFAELFIRRQQNLLMNFCYSDERRWRNINKSTVPAEIQRWKDIDFRKAEIKVKKLQRRIASAWANKNFKTVDTLQHKLIHSFSAKALAVKTVVDNKGSRTPGVDGVIWSDLRQKLDAIYQLRRRGYKPMPLRRVYVPKKDGTLRPLSIPTMRDRAMQMLCKMALEPIAEATADKRSFAYLSGRGAREAIICLKVTMRDNPQFRWVMKADVAGCFDNIDHSWLLEHIPIDRKILYRFLKCGYIEDSTFYPTERGVPQGGCISSVLCNMTLDGLEGLLKQQFGLSVCMIRYADDIIIIGESREILVQAVTPVIESFLAERGLALSKKKTGYYPVKAGVSFLGWKTYRDRDRVISEPSNIAVNRLMNEIESIAALAIDYHAQCEKVSSKIRGWLNYYRGIAPRLSLNEVEFYIAQSLLHMQDVELLAGEIQSIFSELLDTL

SEQ ID NO: 723 - protein, 467 aa, synthetic construct
MIRHRDNSSESWKTLPWKQLSRNLFRLQRRVYKAVQVGDKRKAKSLQKLILKSTAARLLAIRQVTQLNAGQKTAGIDGQTALTFEQRFELSEKLRTEANNWKHQGLREIPIPKKDGKTRILKVPTIADRAYQCLVKYALEPAHEATFHARSYGFRTGRSAHDAQRQLFNSLNSQANGIDQRVIELDIEKCFDRINHTAIMDRLIAPLSIKQGIFRCLKAGVNPEFPELGTPQGGVVSPLLANIALNGIESIHRYHRDSNKRITDKTSAESIIEPSVRYADDMVIILRPQDDATVILDKISHFLAERGMKVSEKKTLVTAATDGFDFLGWNFKVQNNGKFKCVPSVDNYKAFRKKVKAIVNNSNYGATTKAEKLAPVVRGWRNYHRFCKMDGSRFSLWHIEHRAFKVFNSETKQNCHTCKQLLKKAFPQVPYSENKYINVTGEKSPYDGDLTYGSERNSPLVIRQKYL

SEQ ID NO: 724 - protein, 607 aa, synthetic construct
MSTASSPLVYEWNDIPWRSIERKVFKLQKRIYQAAQHGNKVAIRKLQKLLLSSWYAKCLAVRKVTQENKGKKTAGVDGKLALSPKQRIRLVQTLSLKPKSTPVRRVWIPKRGSDEKRPLGIPTIENRAQQALAKMALEPEWEARFEPNSYGFRPGRSAHDAIEAIQQSIKYTQKFVLDADIAKCFDRINHQALLEKLETFSVMRRAVKTWLKAKIMDGDELFPSEEGTPQGGVISPLLANIALHGLETAITTAFPKTVKIDGIIHGRYQPRVVRYADDFVVLHADLKLVEKATSIAQEWLSGMGLELKPSKTRITHTFKKHEGNVGFDFLGFHVRQFKVGKCNYRTSGHSRILVDFKAIIKPSKEAIARHYRQVAEVIERNKSAEQANLIRLLNPKIVGWTNYYSTIVSKAVFSKLDHLVTKKLLRWAKRRHQHQSRRQTVRKYWKFSEKGRGWIFQASDISILRWYADVPIKRHVQVAGTKSPFDGNWVYWSKRLQHYPLLTFRQAKLLKEQEGKCRWCRLYFKQGDRIEVDHRIPRRYGGRDEYGNLQMLHVHCHDEKTAIDGTIDSVGPDSIDVNDYVIEEPCEVESLTHGSEDEAFGRPDVLV

SEQ ID NO: 725 - protein, 553 aa, synthetic construct
MQTMRNANVTKRTTDWRSINWRKAYRIVRNLRQRIFKATQKGNLRKVRSLQKLMMKCYSNILLAVRRVTQINRGKNTPGVDKLIIKTPEARGILVDTLSLFIPWKPLPTKRVYIPKSNGKKRPLGISTIIDRCIQAIVKNALEPYWESKFEISSYGFRPGRSAHDAIEKIYLTACPHRRKKWVLDADIKGCFDNISHEFLMKTIGNFPARKLVYQWLKAGYVEQGEYFHTSSGTPQGNIISPLLANIALHGMEEALGIKYNNRSEIVGNRALVRYADDFVIFCETKEDAEQAQTALEKWLNLRGLELSKEKTRIVHLKEGFDFLGFNIRQYQVTNTKTEWKLLIKPSKESILNIRKKLRQEWLNLKGHNVNSVIEKLNPIIRGEANYFRIGVASEAFSALDDWMFKRECKYVNRTHPKKNKQWRANKYWGKLNLERNDKWVFGDKNTGKHILKFSWFKIKRHKLVVGKSSPDDPALRKYWEEREKDKTSNHPKSIQKIASKQGHTCPICGQSLYNGEEIHKHHKTPKSKGGTDNYSNLELVHLYCHQQIHSGT

SEQ ID NO: 726 - protein, 557 aa, synthetic construct
MTKLNQKWHNINWNKTSKYIKNLQEELVVAYKNNDQKLLFSLQEKLMMSFEGRALAVRQIVTNDGKKTPGFDKIIWNSPSAKLQAILQLREILIQKSGDYQTGPVRRTWIPKDQSDELRPLGIPNMIDRGLQALVLMCLDPIIEEMSDTYSFGFRKYRNTGNAIQRIRTILDKPKGPKWVWDADIEKCFDKISHEFLEKETKLIACPKAYEYIIKWLKAPIINKGIKTFPSDGTPQGGILSPLLCNIALNGLENAVRDGLPSPNSSEGRKISGSWVIRYADDFIVTSPCKERLVKEHIPRVSFFLSKRGLNISEKKSKIRSLENEGFTFLGWDVTLKSRSLKRNKSKTNKKVLIIRPSKKSIKSFKREIKDKFRSNKPIRALISELNPVLRGWTNYYRDSYHSQEVFQSIGHYIHQLWWKWAQKKHPKRNKNWIYNRYIFNTEKNSWRIGESKDIMLFDVIQAKQLRIKSLRNNVNPYLDEDYYIQRTVIRDSEKFRVAIYKKQDFRCYVCEQSLYGSEEVHLHHLIPRKDGGQYTLENIVPVHATCHESITYTRKD

SEQ ID NO: 727 - protein, 499 aa, synthetic construct
MSVSEPEITSVTDLTDKELTLQWKTIDWSKAEGIVNNLQSRIASAAKEGNWKKVSKLSRLLTHSYYARALAVRKVSTNKGSRTPGIDGVLWTSSGDKMRAVLQLKSKGYHAKPLKRKYILKKNGKLRPLSIPTIYDRAMQTLHALALGPVESATSDKTSFGFKPYRSTKDAFAYLNICLSKKNAPQWIVEGDIKACYDEISHEWILANTLMNKKVLKEFLKSGYIENYHLFPTENGTPQGGTISPIIANIVLNGLDTILAEVFYSWNNGTIDKKHRNKHRVNFVRFADDFVITADSPETAHKILDIVKTFLEPRGLTLSKEKTLVTHISDGFTFLGWNFRKYKGKLLTKPSKESQKDIITKIHDVMYKARARSQSELIRLLNPIIRGWAQYHNHAISSAIFKKLDHIMFIMLVSWARRRHPNKGFAWIMAKYWHRIGKWKHAFSTDSQTLERFSNMKIIRHRLAKLDKNPYIDRDYFERWRVIEHYRKKQISYSKSSLN

SEQ ID NO: 728 - protein, 565 aa, synthetic construct
MNDIKTSCASTDRKIVAWDSIDWDKCEYEVQKLQARIVKAQKDGRYCKVKALQWTLTHSFSAKALAVKRVTSNKGKETSGVDRVLWDSPLGKWKAISTLKRRGYCPLPLKRVYIKKSNGKLRPLGIPTMKDRAMQALYLMALDPVAETTADNHSYGFRKERSTADAIVQCFIVLSRTVAPEWILEADIKGCFDHISHEWLLNNIPMDRVMLKKWLKCGFIFNKILNPTEEGTPQGGIISPTLANMTLDGIQKLLQERFKKRKVKGVEIYPKIHLVRYADDFIITGRTKEVLENEIKPLICEFLAERGLTLSEEKTKITHIREGFDFLGFNIRKFNNTLLTTPSEKSIEKFLEKIRTIIETKKSTKQESLIRVLNPIIKGWSNYYRTGTAAKSFQRVDWEIFRKLWQWARRRHSQKCKGWVKEKYYRRIGNQAWCFSAEKEIQKKGELKYVQLVHLAAVKTKKHVKIRHDANPYDTNYKCYFEERATRKKLEALKGKSSSWKYAWELQKRKCPICGETLNLNNDWKISKQFVDGKLKERIYHEDCYYNDVHPTKKKYYESVSLQKL

SEQ ID NO: 729 - protein, 417 aa, synthetic construct
MSNNVSPYKAVRTMERLSEAWKQVYKNGIKSTSIDTKNEILEFKKNEIKNLRKIQRLLQQNKFKFENSRGILLKRKGKDPRPIVIASVQSRIVQRSILDVLQENSSIKKYYLSVPTSYGAIKGEDKGVRNAIIATIEAIKNGAEYFYKSDIASFFTKIAIPKVIEVISTFIPDKDFVELLRNATILEISNLNDLGDLKHYFIFDDIGTPQGCCLSPLLGNIFLAEFDKELNKNDIICLRYLDDFILLAPTEKAVRAAFRRASKILAKLSLEAYTAVSDPKKAKVGYYKQGFEFLGVEILNKLIRPNKASCNKLLNEIKEIIKNSLEMNFSMTQSLYKEEYSVTKTLYHIHNKIKGWGNQYYFCNDRNIFITLDEKISGEIDRYLNSFLLKREKLDAKQKRKQLGIHLLIDSKNVPIT

SEQ ID NO: 730 - protein, 439 aa, synthetic construct
MNQQGHRHLSSLSLEVRKRRTLEDAWAAIRANARVSKSADTRKEIEAFEASLSSNLRRISSELQKGKFAFAPAKGVKIPKGADKRQFRPLVVARVESRVVQRAIHDVLSEVPALQPLIYTPHSFGGVKKKRKGELAAVPAAIQAVLDAIKAGGTYLVRSDISKFFTRIPKSSVTNLVANAVDDVDFISLFESAIKVELENMAQLRESASAFPIEDIGLAQGNCLSPLLGNLFLHSFDEEMNRQAGVRCLRYIDDFIVIGTSSECAEKAFSLATQRLKTLGMEISAGKTKEGRVRDGFEFLGIHLSPGLIRPSKSSRDRLIQSVKSAFDESNKGMLGAKKGSAILKSQSLLETLCRVGGIIQGWGKHYRFCNDQETLRQLDVKIEALLKRYLGIYREARDTVGGATKWNLLGIESLAQIKRTPFSWPEVEQKQSASSAAK

SEQ ID NO: 731 - protein, 437 aa, synthetic construct
MKTLLQDVRSEQNIFAAWRHVKSSAINSRNDDIRGAASAFEHNHQKFLRRIILQLRAGTFEFPAATGVLKDKKLRASQNKAPRPIVVTDLETRIVQRALLQVLQPRETLDPRSRNSSLRIKKDERLGSLNDVNVSKYGVGGLIAPHGGVESAIRLITHAIDSGANYYFRSDIEAFFTKIPKSNVVERIAIETRDMDFANLFARALEVKLNNIEQIGPFEYLFPTGKEGVAQGSPLSAFAGNVLLYQLDQELNALDVTAVRYIDDILIVAQDVDRLNQAIDYAEQSLSKHGMKLYEPKAGSSKAAKGRCDNGIDFLGCFLQPNKCIPSADSIARFKSRVTSELSDSKSRIKDALKVGKLLDKRFSTTATLDRVFNYVYGWQKAFSFCSDVVPFEQLDRFVRRQILDYEIAVRRIVKDSSDESQTMVMGLPSMRQLHKG

SEQ ID NO: 732 - protein, 413 aa, synthetic construct
MSRLYKDICSQRTLYGAWRKVRSSAFFSSSDEIKREAEEFESRLPDSLIEIQRALSKQAFIFLQQTGVAQKKPGGKSRPLVLAPIPNRVVQRALLDVLQRKVRFIKRVLITPTSYGGIPEKRVAMAIADARKAMLAGARFHIRSDIPAFFTKINKDRVLEILRPHLNCAATLKLFEEAIKTDLANIDDLRRRRLDDIFPLGIEGVAQGSPLSPLLANIYLADFDQTMNSNGITCLRYIDDFLLLGASLSDVDKAFNRSLKELGKIGLGAYDPRTNKAKASRGTTDTGFDFLGCNVSPGLVQPSEATRKRFKMKLDAEFATASRALRYNAQNRDGDGKYSYSSALYRIDKIILGWGKAFTFCNASQTMKALDDFVSQKLMTLEAEKNAVLARSNSEARRRVLGVRLLTYVASPA

SEQ ID NO: 733 - protein, 420 aa, synthetic construct
MSFTLYEEVSDQDTLAAAWRHVRRSGMLSQSEKTKESIKAFDSDIDTQLAKIASLLREHSFDFGTAKGAPIKRPGKEPRPLLVPEVPARIVQRSLLDTLQNQPGIQAYVDHPCSYGGLPKKNRADAIRHACEAIADGATYFIRSDIHGFFTGILRQGVLDTIQETLRDDSIASLLNEATSIEIGNAEEIQPYLHLFPDYNEGIAQGCCLSPLFGNIYMHQFDEEMNRGDVVTLRYIDDFVILGQDRESTEQAFRQARRMLQALNLSVYRPGDGSRKAAEGSIKRGFEFLGCTITPHCVEPSRAARSAFLERVRNQLDLAAHEMRAGLHELPEHYRSSLVQTLSRISRMIRGWTEQYRFCNPSDAFTSIDVKVDRMVGAYLRSFFKHYKKCKRSPAVRRRLLGIWLATDSSRTPILPIRSK

SEQ ID NO: 734 - protein, 338 aa, synthetic construct
MEKNLKSVYLGRLQNALEAQQRTKEEIITCTQYAQKLMADNLPVLFEENHVYQVLKWKKSNQQQYHTFYLVQKGKERKITAPSRELKRRQRWILDNILIKLKVSDYAHGFVKNRSIRTNAELHMTHDYALCMDIEDFFPSIKEDTVKEVFARAGYSRRAANALADMCCYFGALPQGAPTSPYLANLVFIEKDHELALLAKQHDATYSRYADDLTFSSDNPLGNLSEAVNQVLQNNGFRLNDSKTKEFFPGQPKRITGLIVQNGLIRVPRKFKRTLKQEIYYCKKYGVALHLENTRAHKAINYREYLYGKAYYVNMIEPELGKHYLKQLDEILWPSYYL

SEQ ID NO: 735 - protein, 337 aa, synthetic construct
MSYVQKLKDKMVEQGEDENYVELCVSYTQKLCNNSVPVIFDFKHLSLLLGYEPPELAFYLFAPEDSFYTKMQIPKKSGGMREIEIPSDKLKSIQRWILRNVLENIEVHESCYGFTKGKSIYDNALLHVGKECVLNMDLKDFFPSITQKAVFNIFYQKGYTKSVSYYLAKLLTKDGVLPQGSPASPKISNIVALHLDKRLSELAKCYKATYSRYADDLTFSGASNIKNMIPIITQIIHEEAFFVNEKKTRYSYYFQKQEVTGLIVNKKVSVPKEYLRELNKEIYYCKKFGVSSHLTKIENHKSFFKEYMYGKAYFVNMIDKELGQKILCELDTILWEY

SEQ ID NO: 736-738 - skipped (3 entries)

SEQ ID NO: 739 - DNA, 27 bp, synthetic construct
  source 1..27: mol_type = other DNA
actctgtgagcggatcttggcttagcc

SEQ ID NO: 740 - DNA, 1836 bp, synthetic construct
  source 1..1836: mol_type = other DNA
atggactacaaagacgatgacgacaagtacccctatgatgtacctgattatgctgccagcaatttcacacagttcgtccttgtagacaacggcggcaccggggatgttacagtggccccgagcaatttcgcaaacggcgtagccgagtggatctcctctaatagcagaagccaggcttataaggttacatgctctgtaaggcagtcttccgcacaaaatagaaagtacacaatcaaggtcgaagtgcccaaggttgctacacagaccgttggtggagaggagttgccagtggctgggtggcgctcctacctgaatatggagttaacaatccccattttcgctaccaattcagactgtgaactcattgtcaaagctatgcaaggtcttcttaaggatggtaacccaattccaagtgcaattgctgctaattcaggcatttattctggcggcagcagcggcggctcaagcggaagtgaaacacctggaacttccgaaagcgctacgcctgaatcttctggtggatcttctggcggatcttccgcatgcatggatacttcctctttaatggagcagatcttgagtaacgagaaccttaatgctgcttatcttcaagtggtacggaacaagggggccgctggcgtggatggaatggagtacaccgaattacagaaacatctgtcagagaacggggagataattaaagaacagctccgcacccgaaagtacaaacctcagcccgttcggagagtggaaattcctaaggccgacggtggcatacgcaagctcggcgtgcctactgttaccgacaggtttattcagcaggcaattgcgcaggttctgacgcccatctacgaagagcagttccacaatcattcatatggctttagacctaatcgatgtgcacagcaggccgtgatgaaagctctggagatgatgaatgatggtcactcatggatagtcgacatagatctggagagatttttcgatacagttgaccacgataaacttatgacgatcatcgggaggacaatcaaagacggcgacgtgatctctattatccggaagttcttagtctccggcatcatggttgacggagagtatgaggactcagtcattggtactcctcagggcggaaacctttcacctttgctcgcgaatatcatgctcaacgagctggataaagaaatggaggctcgcggcctcgatttcgtgcgctatgctgacgactgcattattatggtgggttcaaggcaggcagctgagagagtgatcagatcaattacaaggtacatcgaggagaaactgggcctgaaagtgaacgcatccaagagcaaaattgacaaacccaaaggcataaagtacctgggctttgggttttactacgatagttttgcgaaagaatatagggccaagccacatgccaaggcagtagagaaatttaaggcacggatgaaggaactgacatgtagatcatggggtgtggacaatgggtacaaagtgaaaaagttaaacgaactgatcaggggatggattaattattttaaaattggcagtatgaaagggctctgcgaaaagctggacgccaatatccggtaccgcctgcgaatgtgtatatggaagcactggaagactcctcagaatcgggccaagaatttgataaaactcggtatctcccgccgatacgcctggtccaccgcctactccggagcgagaatcgcctacgtgtgccagagaggagccatgaacattgctgtgacaaaggaaaggttgacaagatttgggctggtgagtatgttggactattacgtggagcgccgctccttaatgttgagttga

SEQ ID NO: 741 - DNA, 1851 bp, synthetic construct
  source 1..1851: mol_type = other DNA
atggactacaaagacgatgacgacaagtacccctatgatgtacctgattatgctgccagcaatttcacacagttcgtccttgtagacaacggcggcaccggggatgttacagtggccccgagcaatttcgcaaacggcgtagccgagtggatctcctctaatagcagaagccaggcttataaggttacatgctctgtaaggcagtcttccgcacaaaatagaaagtacacaatcaaggtcgaagtgcccaaggttgctacacagaccgttggtggagaggagttgccagtggctgggtggcgctcctacctgaatatggagttaacaatccccattttcgctaccaattcagactgtgaactcattgtcaaagctatgcaaggtcttcttaaggatggtaacccaattccaagtgcaattgctgctaattcaggcatttattctggcggcagcagcggcggctcaagcggaagtgaaacacctggaacttccgaaagcgctacgcctgaatcttctggtggatcttctggcggatcttccgcatgcatggaactgattgactggatcctggctgaccagaatatcgacgctgcaatttgggccgtgaaacacaatcgcggcgcagcagggatagattcaatgcaggtcgacgaactcgatgaatattttaagaaccatagagaggagattaaacaacttatacgagaaaaaaagtatgtcccccagccggtgcgcagagtctacattccaaaacccgacggaaagcagagacccctgggcataccaaccgttgtagatcgtgttattcaggaagcaattgcgatagtgctgatgaagggatatgatagatacttttccgagtacagctacggcttccggcctaaccgaaactgccaccaggctgtcactaaagccctggaatacatgaacagtggctacgagtgggtggtagaccttgacattgagaaatactttgatactgtaaatcatgataaactggtttcaatattaagggagcgaatcaatgacgacactaccctccacctgattagggctttcttgaaagctggagtgatggaaaatgggttggtctcaccaactgagcagggcgtgccccaaggcgggccactctctcctgttttgtctaacgtgtatctggacaagctggacagggagttggagaacagaggcttacacttctgtcgatacgctgatgattgtactatctatgtaggaagcgagatggctgcaaatagagttatgaggtctatagctgactggctggggcgcaagctgaaattaagagtcaatatgactaaaagcaaggtggtacggccttcaggcagccaatttctcgggtttcggttttggaagagcccaagggaaggctggaaacctaaacctgccaaagagagatgcaaaagactcaaggataaggtgagggcgatcttgtgtcgccgaaaggccgttgcagtgcccttaggagtcacgattacaaagttgaatcagttaatgcgtggatggatcaattacttctgcctgggttccatgaagggatttatgaaggagtttggggaatggatgcgacacaaagtacgcgttgtgattttaaagcaatggaagaaggccgatactatctacaggaacctgaggaaaacaaatcgtatctgcagatgtggcatttctgacgaagaaatatacaaggtggcttattccggtcgaggttggtacaaacgagctactcataacgcagtgaatttcatactgagtccacaggtactgagtcagcggactaagcaaaggccaggactggtggatccgcttaagtattaccttgcaaggtgtacttga

SEQ ID NO: 742 - DNA, 1956 bp, synthetic construct
  source 1..1956: mol_type = other DNA
atggactacaaagacgatgacgacaagtacccctatgatgtacctgattatgctgccagcaatttcacacagttcgtccttgtagacaacggcggcaccggggatgttacagtggccccgagcaatttcgcaaacggcgtagccgagtggatctcctctaatagcagaagccaggcttataaggttacatgctctgtaaggcagtcttccgcacaaaatagaaagtacacaatcaaggtcgaagtgcccaaggttgctacacagaccgttggtggagaggagttgccagtggctgggtggcgctcctacctgaatatggagttaacaatccccattttcgctaccaattcagactgtgaactcattgtcaaagctatgcaaggtcttcttaaggatggtaacccaattccaagtgcaattgctgctaattcaggcatttattctggcggcagcagcggcggctcaagcggaagtgaaacacctggaacttccgaaagcgctacgcctgaatcttctggtggatcttctggcggatcttccgcatgcatgaggtcacaagagggaagacggcagcagaaagctcctgagggcgcgtacttgtgggaagagatggtgaagccatggggtactactggaggaccaagcccgtcttccgctcagggaggcgcgacccctcgcggggggcagggcagtggtttgatggagcaggtggttgagaggagcaacatgctggctgcgctgcgtcgggttgaaagaaatggaggcgcaccgggagtcgacggcatacccaccgagaggctccgcgatcagattcgagccgagtggccaagaatcagggaagaacttcttgccggcacttaccgccctaaaccagttcgccgagtggaaatcccgaagcctggaggaggcaagagactgctgggtatccccacagcggtagaccgccttatccaacaagctctcctccaggtgctgactcctatctttgatcctcaatttagcgaagcctcttatggcttccgacccggcagacgggcccatgacgccgtgaggaaggccagacaatatgtcgaagagggttacgagtgggccgttgacttggatattgagaagtttttcgatcaggtgaaccatgacattttgatggcccgggtcgcgcgaaaggtgactgataagcgcgttctgactttgatccgcaggtatcttcaggcaggtgtcatggtcaacggcgtggttatcgagaccggggaaggcactcctcagggtggtcccttgagccccttactggcgaatatccttcttgatgaccttgacaaggagcttgaaaaacgggggcacaaattcgtgaggtacgcagacgactgtaatatatatgttaagagcaagcgcgctggggaacgagttatggctagtatcagaaaattcctgcaggaacggttgaagcttaaaattaacgagcagaagtctgccgtcgatcggccctggaagctgaaattcctgggtttctccatgcataaacgtaaaaccggtgaaattctcattcggcttgctccccaggctatagagcgtgttaaaggcaaaatccgggagattacagcacgaaacaagcctgtaagtatggccgagaggatcgaacgactgaatacatacttaggaggatggatcggttattttgcattggccgagacccccagcgtctttgaggagatcgaagggtggatgcgacgacggctccggatgtatttgtggaagcagtggaagcgggtccgtactcgctatcgcgaactcagagctcttggcttatctgaatgggtcgtgcaccagttcgctaacgcccgtaaaggtccctggcggatggcccacgggcctatgaatcgagccttaggcaacgcctattggcaaagccagggtcttatgtcactgaccgagcgataccagagcctgcgacaggcttga

SEQ ID NO: 743 - DNA, 1917 bp, synthetic construct
  source 1..1917: mol_type = other DNA
atggactacaaagacgatgacgacaagtacccctatgatgtacctgattatgctgccagcaatttcacacagttcgtccttgtagacaacggcggcaccggggatgttacagtggccccgagcaatttcgcaaacggcgtagccgagtggatctcctctaatagcagaagccaggcttataaggttacatgctctgtaaggcagtcttccgcacaaaatagaaagtacacaatcaaggtcgaagtgcccaaggttgctacacagaccgttggtggagaggagttgccagtggctgggtggcgctcctacctgaatatggagttaacaatccccattttcgctaccaattcagactgtgaactcattgtcaaagctatgcaaggtcttcttaaggatggtaacccaattccaagtgcaattgctgctaattcaggcatttattctggcggcagcagcggcggctcaagcggaagtgaaacacctggaacttccgaaagcgctacgcctgaatcttctggtggatcttctggcggatcttccgcatgcatgggtgaggtgagggtgaagcccgggggcactcctagagggcgcagcatcgaccggcaggatctgaaactcattctgcggcgggagaagtacagaatggacttaatggaacagatgctttccagagagaatatgttgcaggccctgcgcagggtggaagcaaacaaaggggcagccggtatcgactccgtatcaactaggcagctgagggcacacgtggtccagcactgggaaacaactaaggcgaaactgctggccgggacatataagccctcacccgttaggcgcgttgagatacctaagccagatggcggtgtacgactgttaggaatcccaactgtgatggatagactcatacagcaggctatccttcaggtcctgacaccaatcttcgacccaacattttctcctcattcttatggatttagacccaaacgacggggccacgatgccgttcgccaggcacaggagtatattcgggaggggtaccggtacgttgtggacattgatctggaaaagttcttcgaccgagtcaaccatgatatattgatgtcccgggtcgcccggaaggtgaaagacaagcgagtgcttaagctcattagggcatacctcaaagccggcattatggccgagggaatccgagtcagatctgaagaaggtaccccgcagggtggtcccctgtccccccttctcgccaacatcctcctggatgacctggataaggagctcgaaagaaggcaactgcggttcgtgcgttatgctgacgattgtaatatctatgtcaagacccgcagagctggggagcgcgtgaagcggtccattacaaagtacctggagaaaaaattaaaactcaaggtcaatgaagcgaagagtgccgtggaccgtccttggaagaggaaattcctcgggttctcttttacgtttcataaggaagcgcggatcaggatcgcgcctaagtccctgaaaagggtgaaagacaaaattcggagtctgacaaggggtaatcacctgacctccatggaaaccattatcgaggacttgaatagatacctgatgggttggatggggtattacgcccttatggacaccccatctacattaaaagcccttgatgagtggatccgtcggcggttgaggctggtcctttggtctcgttggaaacgcgtccgaacaaggtatcgcatgttacgggctttggggctgcccgaacgcgatgttcacaagcttgcgaatacacgcaagggcgcgtggagaacttccaaaaccccccagatgcataaagctctcggtatagcgtattggaagagccaagggctcatgtccctcaccgaacgatatttcgaaatcagacagggttggaggacagcatga

SEQ ID NO: 744 - DNA, 1953 bp, synthetic construct
  source 1..1953: mol_type = other DNA
atggactacaaagacgatgacgacaagtacccctatgatgtacctgattatgctgccagcaatttcacacagttcgtccttgtagacaacggcggcaccggggatgttacagtggccccgagcaatttcgcaaacggcgtagccgagtggatctcctctaatagcagaagccaggcttataaggttacatgctctgtaaggcagtcttccgcacaaaatagaaagtacacaatcaaggtcgaagtgcccaaggttgctacacagaccgttggtggagaggagttgccagtggctgggtggcgctcctacctgaatatggagttaacaatccccattttcgctaccaattcagactgtgaactcattgtcaaagctatgcaaggtcttcttaaggatggtaacccaattccaagtgcaattgctgctaattcaggcatttattctggcggcagcagcggcggctcaagcggaagtgaaacacctggaacttccgaaagcgctacgcctgaatcttctggtggatcttctggcggatcttccgcatgcgtcgacaagggccgaatgcagaaaatatctaaggatacctggctccagaaggacagggccgagcctgattcatatgctgccgggcagaccttcatgagaatcacagagaacaaccttactgacgtcacaacgttggaggacggcctgctggaacagatcctcagccctagcaacctgaaccgcgcatataagaaagtgcgaagtaataaagggaagggtggagtggacaagatgggaattgagcatttgcaggactatttggttgaaaaccgggtcgaactgctgcagtcaataagggatggtaaatatagaccgaagcccgtgagacgggtcacaattccgaaagagaacggaaagaaacggctccttgggctgccaactgttgtggataaagtgattcagcaggcaatcacccaggtcctgtctcccatttatgagaagcagttcagtgcatacagttacggtttccgacctggccggaatgcccaccaagctttgaaaaaatgccgggattatatctccgacggccacatctacgctgtagatatggatctgcaagaattttttgataaggtcagccactctcggctcgtggaaatcctttcccgcaccataaaagatggaagagttatctctttgattcataaatacctgagagccggcgtgatgattggtaataagtttgaggaaactgagctcggagtgccccaagggggacctctgtccccactgctgtccaacatcatgctcaacgaactcgacaaggaactgcaacgcagggggcacagattcgttcggtacgcagacgatctcatgattgtgtgtaaatctaagcgctctgccggcaggacactgaggaatattataccctttattgaggataagttgttcctgaaagtgaaccgggagaaaactaatgtaagtcacgtttccaagatcaagtttcttgggcacaccttctaccgatcacatggaaaaggacggtttcgagcccacccaacatcaattagaaaaatgaagcaacgccttaagcagcttacttcaaggtccaatggctggggcgaagatcagagaaaagagagcttgaatcattacgtcagaggctgggtgaattacttcaagatggctgacatgaagagcctgctccgcaaaatagacagatggtatcgcaggaggcttagaatgtgcatttggaagcagtggaagcggatccgaactaagggcaagatgctcatcaagctgggtctcaataaatggaaagcttgggaatacgctgacaccaggaaaagccattggcatatagcaaatagtttcatcctgaccaggacgatcacaacccacagactgaggcaggccgggtatccatttttgcttgactactatagcaaagtacgcacagatatctga

SEQ ID NO: 745 - DNA, 1968 bp, synthetic construct
  source 1..1968: mol_type = other DNA
atggactacaaagacgatgacgacaagtacccctatgatgtacctgattatgctgccagcaatttcacacagttcgtccttgtagacaacggcggcaccggggatgttacagtggccccgagcaatttcgcaaacggcgtagccgagtggatctcctctaatagcagaagccaggcttataaggttacatgctctgtaaggcagtcttccgcacaaaatagaaagtacacaatcaaggtcgaagtgcccaaggttgctacacagaccgttggtggagaggagttgccagtggctgggtggcgctcctacctgaatatggagttaacaatccccattttcgctaccaattcagactgtgaactcattgtcaaagctatgcaaggtcttcttaaggatggtaacccaattccaagtgcaattgctgctaattcaggcatttattctggcggcagcagcggcggctcaagcggaagtgaaacacctggaacttccgaaagcgctacgcctgaatcttctggtggatcttctggcggatcttccgcatgcgtcgacagaggcgtgaagcccacgatggaaaagaaactcactaagatgaaagtgtctaaccaaagtggttataccgggttctccattttctctctcggggaaatctgtctcgaggaggtgaccgatgggtacaatctcgaaaaagcactgaaatgcgtagcccggaacaaaggagcccccggcatggatggcgtagagacaaaagactatgccctgcaccggcagattgcagggttcaaggatctgattgacgatatatcagctggcacttaccggcctaagccagttaaacgagtgtacataccgaaagaaaatggggataaaaggcctctgggcatacccaccgtggaggacagagtggtacagcaggcccttgccaatatcctgagcaagtattatgaggaagagttttccgacaattcattcggataccgcccaggaagaggttgccgccaggccgttaaaagggcattgaagtatgttaacggcggaagacaatgggttattgatctggatctgagtaagttcttcgacactgtgaatcatagtaagcttctgcagatccttagcgagaagattaaggacgggagggtgatcagtcttattcacaaattcttgaggacaccgatctacgagaacggcgtggtcagtcctaagagcaaacaaggcactcctcagggaggccccgtctccaccatactcgcaaacatcatccttaacgaatgcgaccagatgatggataaggagaatattaaattcgtcaggtacgcagacgacatgatgatattttgtaaatcaaaggaggccgccgagagaacactgaataaggtgactaaatttctcgagaaaacactctttctgactgtcaacaaggaaaagacaaaaatcttgtggtacacccatggaacgcagtttctggggtttacactttcccagtacgtgccaaagcatattaagaaaatcgctccaaagtgtaaggtctatgttaaggtccaccctaaaaagcgagagaaatttcagaagggaattaaagaaacactcgacagaagagctcccgggggtatcgaagagacgaagaaaaagttcaatcaaaagattcggggctggttcaactactttaaaggttccatcccccaaaagtggatggaggaaaccgatgcctggatgaggaggcgcatccgccagatgtattggaaacagtggaagactccacagaatagaatggaaaatttttccaaactgaatccaaaaagccctagccgccgagattacgcttattctaataactcttactggcggatggcacgaaccaagcagatgcacaacgctctgtctaaccggaccttgacaagcatgggttggctgtcactgcaggaattgaacgctcaatatctccaggaaatgtcaggaaatgatatctga

SEQ ID NO: 746 - DNA, 1830 bp, synthetic construct
  source 1..1830: mol_type = other DNA
atggactacaaagacgatgacgacaagtacccctatgatgtacctgattatgctgccagcaatttcacacagttcgtccttgtagacaacggcggcaccggggatgttacagtggccccgagcaatttcgcaaacggcgtagccgagtggatctcctctaatagcagaagccaggcttataaggttacatgctctgtaaggcagtcttccgcacaaaatagaaagtacacaatcaaggtcgaagtgcccaaggttgctacacagaccgttggtggagaggagttgccagtggctgggtggcgctcctacctgaatatggagttaacaatccccattttcgctaccaattcagactgtgaactcattgtcaaagctatgcaaggtcttcttaaggatggtaacccaattccaagtgcaattgctgctaattcaggcatttattctggcggcagcagcggcggctcaagcggaagtgaaacacctggaacttccgaaagcgctacgcctgaatcttctggtggatcttctggcggatcttccgcatgcgtcgacgagcttctcgagcagatccttagtaattctaacctcaacgaggcatataagaaagtctaccggaataaaggagcctctggcgtggatggagtcactataaatgagctgaaagaatacctccagaacaacaaacacaagctgctgagtgaaattcgggctcgcaaatataaaccccagcctgtgaagcgagttgaaattcctaaggcctccggaggggtgcggaagttggggatccctacagttgtggaccgagttattcaacaggccattaatcaagttctgacaccaatttatgaggagcagttttcagaatcttcctacgggttccgccccagacggagcgctcagggtgccgttcttagatcacttgagctgatcaatgatggatacgactgggtggtggacattgacctggaaaggttctttgatactgtgcatcatgatagactcatgaacatcatatctcggaccatcgaggatggggacgtcatatcccttattcggaagtttctcgtaagtggcgtcatgatcgacaataagtatgaagacacaattatcggaacaccccaaggtggaaatctgtcccctttgctgtctaatatcatgttgaatgaactggataaagaacttgagatcagggggctggacttcgttcgctacgctgatgattgcatcatacttgtcagcagcaagaagtctgcaaatagagtcatggcatccgttaccaacttcatagaaaaaaagctgggtttgaaggtgaacgtaacgaaatccaaggtagacagaccgaataacataaagttcctcggctacggctactattatgacggcaaagagggtaaatatcagctcaggccacatgagaagagcatccagaaatttaaaagaaccctgaaaagactgaccaaaagatcatggtctgtgagtttgaactaccgcctttttaagattcgacaagtcatcatgggatggattcaatactttaagtatgggaagatgaagagcaagctgaaagtaatcgactcaaaactgagggctaggatacgaatcgtgatttggaagcagtggaaggtgccaaagaagcagattaactcactgatgaagctggggattagcctcgatgaagccaagggcattacttactgtcgcaaaggttatcagttcatcggccacagtaaagtgatccagaaagccattaataacagcaggctcaagaaaaggggcctcacttccgcattggatcactacctgaaagtgcagaccgtgatcgatatctga

SEQ ID NO: 747 - DNA, 1827 bp, synthetic construct
  source 1..1827: mol_type = other DNA
atggactacaaagacgatgacgacaagtacccctatgatgtacctgattatgctgccagcaatttcacacagttcgtccttgtagacaacggcggcaccggggatgttacagtggccccgagcaatttcgcaaacggcgtagccgagtggatctcctctaatagcagaagccaggcttataaggttacatgctctgtaaggcagtcttccgcacaaaatagaaagtacacaatcaaggtcgaagtgcccaaggttgctacacagaccgttggtggagaggagttgccagtggctgggtggcgctcctacctgaatatggagttaacaatccccattttcgctaccaattcagactgtgaactcattgtcaaagctatgcaaggtcttcttaaggatggtaacccaattccaagtgcaattgctgctaattcaggcatttattctggcggcagcagcggcggctcaagcggaagtgaaacacctggaacttccgaaagcgctacgcctgaatcttctggtggatcttctggcggatcttccgcatgcgtcgacgagctcctggacaaaatactggagcgggagaatctgaacaaagcatataagcacgtgaaggctaataagggagcacctggggtggatggcgttacggttgatgaagcatacgaaaatattcgacagaataaggagaaatggctgcatcagattcgcaaaaggacctacaaaccccaacccgtccgcagagtccagatcccgaaagaaaatggtaaaatgcggaatctcggtataccaaccgtttttgacagaatcatccaacaagccatggtgcaggtcctgagtccaatttttgaagaacagttcagtgaaacatcttacggctttaggcctgggcgatgttgcgagaatgcagtggttaaagctcttgagtatctgaacgacggatatgaatggatcgtggatattgatttggagcggttctttgatactgtggatcaggaccgactgattaatattattatgaggacaatcaaggacggggacgtggtttccctcatcagaaagtacctctctgctggagtaatggacaaaggagttactaaagccaccgagaaaggaacgcctcagggcgggaacctcagccccttgctttcaaacattatgcttaacgaactggataaggagctggaggccagaggactgaggttcgtgcggtatgctgacgattgcattatcctcgtgaagtcagagaaagctgctaaccgggtactggagagcataaccaagtacatagaaaagaaactgggcttgaaagtcaacgcagaaaagagcaaggtaacccgcccaactaagactaaatacctgggttattcattctggaaagacactaagggcaaatggaaaccaaagccccatcttaagagctatcagaagatcaagcggaaattgaagcaactcacatgtagaagaatcagtatctcccttgacgaaagaatcaaacagattaattatgccattaggggctgggtaaactacttcaggatcgcaaacatgaaaaacgccatacaggagattgatgagcacttgcggaccagggtccgcgtgattatctggaagcagtggaagaaagcctctcgaaaggaaaaagctctgctgcaacttggcgtgaagcctgatatagctcacaatttggccaacacatccaagggttatcagcttgtggccaagacagattggcttaaattcgccattaatatcgaacgccttagaaagcgcgggcttatctttctctccgaccagtaccagaaggtgcatgtcgagatagatatctga

SEQ ID NO: 748 - DNA, 1947 bp, synthetic construct
  source 1..1947: mol_type = other DNA
atggactacaaagacgatgacgacaagtacccctatgatgtacctgattatgctgccagcaatttcacacagttcgtccttgtagacaacggcggcaccggggatgttacagtggccccgagcaatttcgcaaacggcgtagccgagtggatctcctctaatagcagaagccaggcttataaggttacatgctctgtaaggcagtcttccgcacaaaatagaaagtacacaatcaaggtcgaagtgcccaaggttgctacacagaccgttggtggagaggagttgccagtggctgggtggcgctcctacctgaatatggagttaacaatccccattttcgctaccaattcagactgtgaactcattgtcaaagctatgcaaggtcttcttaaggatggtaacccaattccaagtgcaattgctgctaattcaggcatttattctggcggcagcagcggcggctcaagcggaagtgaaacacctggaacttccgaaagcgctacgcctgaatcttctggtggatcttctggcggatcttccgcatgcgtcgacaacgctgaaaacctcattgacgagagttgcccacagcgaacctctgctgaacatgagaagtacgcaggcgcacaatctgctgctccccgagaatcagaagctgaggatagggccgacctgctggaacgaattttggatcgcgataacatgaatgaggccttcaagagagtgagggccaataagggtgccccaggcattgatggcatgaccgtggaagctgcacttccctggctgattgaacatggaaaggagctgatcgattctctcagagacggtacttataaacctcagcctgtgagacgcaaagagatacccaagccagatggtgggatccggaagcttggtattcccactgtgatcgatcggatgatccagcaggccatcacacaacagctgacacctatctacgagccgatttttagtgacaattcctacgggtatcgccctcataggaatgcacagatggccattagaaaggctaaggagtacgctgacgaggggtataccgtcgccgtggaaatcgatttgacgaagtatttcgacacacttaaccacgaccttttgatgaacactgtcagagaggaggttaaggacaagagagtcttggagctcataaaaaaataccttaagtccggagttatggctaatgggctgctgattaaaacggaagagggatccccacaaggcggcccgctgtcacccttgttggcaaatatttacctgaataaatatgaccacgaaatgacccggcggggagttaaggagatcagatacgctgatgacatagttctcttcgcaaagagtaagagagctggagaacggctgttggagagcagccgacggtatcttgagaagaaactcaaactgaaactgaacagtgaaaaatccaaggtagtctcaacctatagtcctcgcaaatttaaattcctgggctatgctctgggcaaatctcggcaggggaccttcatcaggatccatgctaaggcccttaagaaagccaaggagaaacttaaggaacttactagccggtcccagggaagaaaaatctgcgaagtgtttgcccggttgaagcggtttgtgaacgggtggataaactattttggtatcgctcgcataaaaaagactctcgaggactgggatgggtggctgcgccgaagaattaggatgtacatttggaaacagtggaaaaagacacgcaggcgaaaagaaaatcttatgaagcttggagtaccagagtggagggcctgtgaggcagcctacagcaggaaagcctactggcgcagcgccaaacacgcatcagtgcactccgccctgacaaatgaaaggctcgcaagagcaggctactacagcctgtctgaaaggtatgagtcactccacctctatgatgatatctga

SEQ ID NO: 749 - DNA, 1935 bp, synthetic construct
  source 1..1935: mol_type = other DNA
atggactacaaagacgatgacgacaagtacccctatgatgtacctgattatgctgccagcaatttcacacagttcgtccttgtagacaacggcggcaccggggatgttacagtggccccgagcaatttcgcaaacggcgtagccgagtggatctcctctaatagcagaagccaggcttataaggttacatgctctgtaaggcagtcttccgcacaaaatagaaagtacacaatcaaggtcgaagtgcccaaggttgctacacagaccgttggtggagaggagttgccagtggctgggtggcgctcctacctgaatatggagttaacaatccccattttcgctaccaattcagactgtgaactcattgtcaaagctatgcaaggtcttcttaaggatggtaacccaattccaagtgcaattgctgctaattcaggcatttattctggcggcagcagcggcggctcaagcggaagtgaaacacctggaacttccgaaagcgctacgcctgaatcttctggtggatcttctggcggatcttccgcatgcgtcgacgttaggtctcgaaaagaaaggatgagagaggaggataagtcacggccaaatactaggctttgtgaacagcttatctccctggctaatatccaacaggcagtcaagaaggtgatgcagaacaaagggtctgcaggcattgacggtatggaggtcaccgagttgccaagttaccttgaggctaactgggccctgatacgcgagcagattgtgacccgcacctacaagcctaaacccgtactcagacgcgagattcctaaggacaatggcggtatgaggttgctgggaatccccacggctgttgatcgggtgattcagcaggctttggtgcaagtcttgacaccagttttcgagccaaccttcagcgatttctcttacggattccgacctgggcggtcagctgaagatgccgtccggctcgcccagacatatatgtcagaagggtataaacatgtggtcgatcttgacttgagtaaatttttcgacactgttgaccatgacatcctgatgggcctcatcgacaaacacatggatgataaagatgtaaggcggttgatttatgtgtatctgaagagcggagtcatgactaatggctctatggccgtgactgctctgggtacaccgcaaggaggtcccctcagtcctctgctctccaatgtgtacctgactccgtacgaccgggaattggaaaaacggggtctgagatttgtgcgatacgccgatgactgcaacatctttaccaagagcaaaatgtcctcatatcgcgtccgagactcagccaagagttacctggaacgaaagctgaagctcaaagtgaatatggagaagacagaggcccgccgcgcagtgggatccaccttcctcgggtttacctttagaacgtatggcaaaagggggaagcttggaatgacagttccccacgaaaagaagctgaagaagcttgaagataggattaggctcgttactaaacggaatagaggggtaagcatcggcatggtgattagagacctcaacagcattctgagagggtgggtgggctacttcgcaagatctgcaatcaaaaactatctcgaacgactgatggaatggatccgcagacggataaggcaatatctgtggaaacagtggaaaagcggcaaaaatcgaaaacataggctgagacagcttggcgtggatgagtggaagctgaaaaagtggaagctcggaagcaattcctattggaagatggcagggacaatgaactacctcatcgataaggagtccatacacggaagatacggcctggttgacatattgggttactataacaaactccacgcccagaggatggagagtgacggcattgtccttgatgtacgctacaactctctgtttggagatatctga

SEQ ID NO: 750 - DNA, 1860 bp, synthetic construct
  source 1..1860: mol_type = other DNA
atggactacaaagacgatgacgacaagtacccctatgatgtacctgattatgctgccagcaatttcacacagttcgtccttgtagacaacggcggcaccggggatgttacagtggccccgagcaatttcgcaaacggcgtagccgagtggatctcctctaatagcagaagccaggcttataaggttacatgctctgtaaggcagtcttccgcacaaaatagaaagtacacaatcaaggtcgaagtgcccaaggttgctacacagaccgttggtggagaggagttgccagtggctgggtggcgctcctacctgaatatggagttaacaatccccattttcgctaccaattcagactgtgaactcattgtcaaagctatgcaaggtcttcttaaggatggtaacccaattccaagtgcaattgctgctaattcaggcatttattctggcggcagcagcggcggctcaagcggaagtgaaacacctggaacttccgaaagcgctacgcctgaatcttctggtggatcttctggcggatcttccgcatgcgtcgacgaactcatagaggtcatactgtccaaggaaaacctgaatagagcttacaaaaaggtcgtagcaaataagggtgcctccggggtggatggtgtcggggtggaggaactgggagattacattcgggaaaataaagacgttataattacaagcatcagaaacaggacctacatgcccaaacctgttcgccgggtgtacatcccgaaagaaaacggcaaacagcgcccacttggtattccaacggtactcgataggactattcagcaggctatcgcccaacctatttgggacatatacgaagaaattttcagcgagtactcttatgggttccgccctggccgaagttgccatgacgcaattcgccaggccctgtattatctcaacgatggctatgagtgggtggtagacatcgatattgagcagtttttcgataaggtcaaccacgacaagcttatccagatactgggggagcaggtcaatgattctacaaccttgaacctcatcagaaagtacctcaaggcaggagtcatggagaagggccttgaaaaagccacaattaccggcgtaccgcaagggggcccactgtccgtggtgtgttccaatatctatctggataaactggacaaggagttggagaagcggggcctgagatttaccaggtatgctgacgatgtcttgatctttactaagtctgagatggcagctaatagagtgatgaaatcaataaggagctggctcgagcgaaaattgttccttaaggtgaatggtactaagacaaaagtggtgcgccccacgcgcagtaagtatctcggctttactttcgtgaaaaattccactgagtggaaagttagacctaccaacgaaaagaagaagaaattgaagaaaaagctgtcagagtacctgaaacggggaaaagccgtggccaggccccttgctgtcacaattaagagagtcaacgaaattgtgcggggatggatcaattactttaggatcggaatgatgaaacagttcatgcaagaattgggagagtggctgcgacacaagattagggtgatcgtagtgaaacagtggaagagacccaagaccatttacaggaatctgtcttacctcaattggaagtataagatcggatgcaaacaagaagagatctttaaagttgccaactcacggttggggtggtatagacgatgtggcatgagcgtggtgaacttcatcataagtaaggaccttctggaaaatcggattaaagacggggttggactcctgaacccattgtcatactatctggttaaagttggtatcgatatctga

SEQ ID NO: 751 - DNA, 1974 bp, synthetic construct
  source 1..1974: mol_type = other DNA
atggactacaaagacgatgacgacaagtacccctatgatgtacctgattatgctgccagcaatttcacacagttcgtccttgtagacaacggcggcaccggggatgttacagtggccccgagcaatttcgcaaacggcgtagccgagtggatctcctctaatagcagaagccaggcttataaggttacatgctctgtaaggcagtcttccgcacaaaatagaaagtacacaatcaaggtcgaagtgcccaaggttgctacacagaccgttggtggagaggagttgccagtggctgggtggcgctcctacctgaatatggagttaacaatccccattttcgctaccaattcagactgtgaactcattgtcaaagctatgcaaggtcttcttaaggatggtaacccaattccaagtgcaattgctgctaattcaggcatttattctggcggcagcagcggcggctcaagcggaagtgaaacacctggaacttccgaaagcgctacgcctgaatcttctggtggatcttctggcggatcttccgcatgcgtcgacgatgccgagcgccagcagggacgggcctatcaacttacattcaattttgagggggacgctgagacgttgcgccatgatcagggcggagatgatgggattggcaccgctcgaccagaggagcctcagaccagcacggcatctgatcccgcaagagcactcacagagagactgatggaggaggtcacccgcccagagaacctgaatagggcttaccgaaaagtgaaagccaacaagggagctcccggagtggatgggatgaccataggtgaccttagagcctggatcgctatgcacaaagaagaactgatcgcttcacttttggatggatcctatcggcctcagcctgtccgcggggtgcaaatccctaaacccggaggaggagtaaggcagcttggtattccaacagttgtggacaggcttgtgcaacaggccatccttcaggttctggaacctctcttggaccccaccttctcaccgtcaagtttcggcttccggcccgggcgcggtgcacatgatgcacttaagcaagctagacagtacgtggccgacgggagggtgatagtggtggatgtagacctggaaaagtttttcgacagagtaaatcacgatattctgatggcaagactggccaggaaggttgccgatcgaaggttgctggggataatccgcaggttcctccaggctggccttatgcaggaaggtgtctgcgtggcaagacatgaaggcactcctcagggtggcccacttagtcccctgctggctaacctccttttggatgatctcgacaaggaactcgagagacggggccaccacttttgtcggtacgcagacgattgtaatatttacgtgcagagtaaggccgcagggcaacgggtccttggcagcgttacacggtttctcgaggtggtcctgcgattgagagtcaaccgagacaaaagcgaggttgcctatatcgaagaacgcaagttcctgggctataggcttctgtccggtggacgattgggtatcgccccgaaatccttggaacgcgctaaggaccgaattagacagatcaccaggcggaatcgaggcgttagcgtagacagaatgacatctgaactgaacagttttctcactggctgggtttcatacttccggcacgctgcctgtaagtctcatctgactgagctggacggatggattcggaggaagttgaggtgcgtgaggctcaagcattgcaaaagatctaaaacactggcagactttctgggatcccacggagtcgcacaacacactgcttgggtgaccgccttgtctggcaaaggctggtggcgactgagcgggagcccagccgcccaccaggctatggaccagcgctggtttgcttccttggggctgattaaccttgcccatcggcatactactctcaatagagatatctga

SEQ ID NO: 752 - DNA, 1956 bp, synthetic construct
  source 1..1956: mol_type = other DNA
atggactacaaagacgatgacgacaagtacccctatgatgtacctgattatgctgccagcaatttcacacagttcgtccttgtagacaacggcggcaccggggatgttacagtggccccgagcaatttcgcaaacggcgtagccgagtggatctcctctaatagcagaagccaggcttataaggttacatgctctgtaaggcagtcttccgcacaaaatagaaagtacacaatcaaggtcgaagtgcccaaggttgctacacagaccgttggtggagaggagttgccagtggctgggtggcgctcctacctgaatatggagttaacaatccccattttcgctaccaattcagactgtgaactcattgtcaaagctatgcaaggtcttcttaaggatggtaacccaattccaagtgcaattgctgctaattcaggcatttattctggcggcagcagcggcggctcaagcggaagtgaaacacctggaacttccgaaagcgctacgcctgaatcttctggtggatcttctggcggatcttccgcatgcgtcgacaaatccggcggcgaatggcggcaacagttgctgccattcgaggccgaagctcctactgggggcgctggacaaaattctgccggacctgctggcgtctcaagggccccttggcgccaacccgaccctgccagcgctagacctacattgttgcgagagatcgtgagggaacgggtgttggaggcagcatggaaacaggtgcgccgcaatagaggagctccaggtattgacgggatgcgggttggcgatttcgaggagtggataggggtccacggcgatcaggtcagggccgagatcctggcagggacctacgaaccacagccggtgaggagggtcgagatcccaaaacccggcgggggcgtgagattgcttggcgtgccgactgtcctggatcgcgtgattcagcaggccctggtaattgtgctcaccccaatccttgaccccaccttcagtgaatccagctatgggtttcggccagggagatctgcccatggcgccgtggcagccgcccgaagacacatcgctgacggttataggtgggtcgttgatcttgatctgtccaagttctttgaccgggtaaaccacgacgtgctggttgataggttgtggaagcggcttggcgacggtcctctcctgagccttatacggagatatttgaaggcaggagtgctcattgaaggagtagtggtggaatctgttgagggcaccccacaagggggtcccctcagtcctctgctgtccaacgtactgctcgatgaatgggatagggagctggaaaggcggggacatcggtttgtgaggtacgctgatgactgcaatatttatgttcgatcacggcgcgctggcgaaagagtccttgcttcatgtcgagacttcctggagcgcagactgcgcctgaaagtgaacgaggaaaaaagtgcagtcgcacgaccctgggcaagacagtttctgggatacagcgttacaaacggaaagaaacctaagcagcgcctggccaaacgatctgttgttcgcctgaaggagcgagtccgggccattacgtctaggagcaggggtatatccttggaacagatgttgcgcgagcttagtcgatacttgcgaggctggagtggttactttcgcaggattgaaacaccctctgtcttggagcagctggattcctggatcagacgaagggtgaggagctttcttttgaagcaatggaaacccggaagaggaagaagacgggctatccagaagctcggagtggacgacgggtggcgactgtcagcctccagaaagggtccatggagactctcacggggaaaggtgatcagcgcagctttgcccaatgccactctcgaacagcgcgggctcgtaaatctgaaacaggagtggaagagactggccgagctcttcgatatctga

SEQ ID NO: 753 - DNA, 1842 bp, synthetic construct
  source 1..1842: mol_type = other DNA
atggactacaaagacgatgacgacaagtacccctatgatgtacctgattatgctgccagcaatttcacacagttcgtccttgtagacaacggcggcaccggggatgttacagtggccccgagcaatttcgcaaacggcgtagccgagtggatctcctctaatagcagaagccaggcttataaggttacatgctctgtaaggcagtcttccgcacaaaatagaaagtacacaatcaaggtcgaagtgcccaaggttgctacacagaccgttggtggagaggagttgccagtggctgggtggcgctcctacctgaatatggagttaacaatccccattttcgctaccaattcagactgtgaactcattgtcaaagctatgcaaggtcttcttaaggatggtaacccaattccaagtgcaattgctgctaattcaggcatttattctggcggcagcagcggcggctcaagcggaagtgaaacacctggaacttccgaaagcgctacgcctgaatcttctggtggatcttctggcggatcttccgcatgcgtcgacggcgacacaatgactaagcggaaacaccattcactgtacggccagattctccagagactggacactgctttcgcaaaggtgaaggcaaacagaggagccgcaggaatcgatggcgaaagtatcgccgaatttgagcaggatctcgaagccaatttggcacaacttaagagagacctcaaggagaagacatatgctcctcagccagtgcggcgagtctatattcctaaggcttccggtggtcagagaccactcggcattcctacagtcagagaccgggttgtgcagcaggccctgagactggtgctcgagcccgtgttcgaaccgctcttttgcgatagcagctatgggttcaggcctgggcgcagtgcccatcaagctctggatagggtcagcggccatttgagagagggttacaagtgggttgtggattgcgatctgaaatcttattttgatactatcccgcaggaggcccttattgaccgggtcgccgaggaagtcgccgatggcactgttctgaaactcatcagatcttttctgcaagctggagtaatgtctgaagggcagttgcagagaaccatagctggcacgccccagggtggtgtgatctcaccattgctcgccaacatctaccttcacggctttgatcagctcatggaggacagaggactgcgacttacaaggtacgctgacgacttcgtgatcctttgtcgaacccagagagcagcagaacgcgtgatgggtaatgtgcagtcttatcttgaaggccaactggggcttaccgtcaatcgcgagaagagcaaggtggtgcatttgtccgaagggttcgtattccttggatacgagtttgggacgtggggacgaaggcccggaccaaaggctattctgaggtttaaacagcggattagagagctgactcgccggaatcagaccatacctgtagacaaaatggtacgcgagcagctgaacccttaccttcaagggtgggctgggtactttgggtatggccaagtgaggcagcgcttcctggactacgataaatggattcggaggaggctgaggatggtccaattgcggtcctggcgacacatgaaaggcctgcacagggcaatgcgacagaaaggatggaaaggtcccctgcccgccgtctatgttaatatgagacggtggaggtcaagtgttcacagccttgttaactatgccctgggacccgattggatacgcggcttgggacttgtgtcccttgttgacttccaccggccaaccatggtgaccgtaacacgcgatatctga

SEQ ID NO: 754 - DNA, 1716 bp, synthetic construct
  source 1..1716: mol_type = other DNA
atggactacaaagacgatgacgacaagtacccctatgatgtacctgattatgctgccagcaatttcacacagttcgtccttgtagacaacggcggcaccggggatgttacagtggccccgagcaatttcgcaaacggcgtagccgagtggatctcctctaatagcagaagccaggcttataaggttacatgctctgtaaggcagtcttccgcacaaaatagaaagtacacaatcaaggtcgaagtgcccaaggttgctacacagaccgttggtggagaggagttgccagtggctgggtggcgctcctacctgaatatggagttaacaatccccattttcgctaccaattcagactgtgaactcattgtcaaagctatgcaaggtcttcttaaggatggtaacccaattccaagtgcaattgctgctaattcaggcatttattctggcggcagcagcggcggctcaagcggaagtgaaacacctggaacttccgaaagcgctacgcctgaatcttctggtggatcttctggcggatcttccgcatgcgtcgacaagaagagaaaatggtacagtctggttgacaagatctggaaattcagtaacctcgaagcagctttcagcaaagtaaaagagaaccggggagccgcagggatcgacagagtgagcatcggccagttcgagaggcagaagcaacagaatcttttggagatccaaagacttctgaggagcaaacgctacgaggcaattccagtcagacgcgttgaaatacctaagagcgacggacggtatagacctctgggcattcctacggtcagagatcgcgtggtgcagcaggctacctttgctgttatgtcccctatttttgagacaaagtttctggactgttcttacgggtttaggaagggacgaaatacgcaccaggccattgccaaaatggaacaatacaggaatgagggctgcgagtgggtggtggaagctgatatagagtcattttttgacaccgttaatcacgagttgcttattgatcaggttgctgaggaaatctcagatggttcagtgcttaagcttattaggtcctggctgactgccggcgcatttaaaggaacagaagtgattgagacttctgtgggaacaccacaagggggtgtcatttccccgcttctcgcaaatatatatctgcacccattcgatgtacagatgacagccctgggcttcaagctggtgaggtatgccgatgatttcgtcataatgtgcagaagcgaggacgaggcagaacgggccatggaagccgctacccggatcctctctgggattaaactccgggtaaaggccgctaaaacccgaatagtgcagctgagtaaggacgacggaatcgaatttctcggtttcaccatcttcaaggaacataaggtcccccgaactagagctgtcgagaatttcaaatcacgcattcgcctgatcactcgaagacagaggcccgctacccttcaggagatcatcaaggaactgaatcccgtggtgcggggttggggaaactatttcaaaattgccaacgtaaactggctctacaaaggcttggattcttggatgcgaatgcgccttcggtcttttctcgagaagaagaagagctatgaagccaacaaaaggctggaaaacaaacattttagtgaagcaggcttgactacactgtcctccttgatcgggtacgatatctga

SEQ ID NO: 755 - DNA, 1938 bp, synthetic construct
  source 1..1938: mol_type = other DNA
atggactacaaagacgatgacgacaagtacccctatgatgtacctgattatgctgccagcaatttcacacagttcgtccttgtagacaacggcggcaccggggatgttacagtggccccgagcaatttcgcaaacggcgtagccgagtggatctcctctaatagcagaagccaggcttataaggttacatgctctgtaaggcagtcttccgcacaaaatagaaagtacacaatcaaggtcgaagtgcccaaggttgctacacagaccgttggtggagaggagttgccagtggctgggtggcgctcctacctgaatatggagttaacaatccccattttcgctaccaattcagactgtgaactcattgtcaaagctatgcaaggtcttcttaaggatggtaacccaattccaagtgcaattgctgctaattcaggcatttattctggcggcagcagcggcggctcaagcggaagtgaaacacctggaacttccgaaagcgctacgcctgaatcttctggtggatcttctggcggatcttccgcatgcgtcgacgcaagtccagccaccgagtgccccgctggacacagtgctgtcgctaccaaaagctccgccggacatagagtgggttttttcgccgctagaagggccgcaaagagccaaggacgaaggcagggccaggacggacaacagcggtcacctaaaccatctagcgggaatgccagggcagaagggccacggcgcgtgaagcgaaaggtttcctcactgatcgaccaggtgtacagatgggaaaacctctaccgcgcttggcgccggatcagaagaaacaagggagtgcatggcttggaccgagtcacaatccggaacttcgaggcagattgggagaaacacctccgagagattcagcgaatgctcatggagcagagatatgttccaactccagttaggagagtatacattcctaaacccgcagatccaaccaagaggcggcctcttgggattcctatagtggctgacaggattgtgcagcaggcaatctttcaagtcgtagaccctctcttcgacagcactatgtctgatcggagctttggataccgcaagggccggaaagctcacgacgccgtcgctgccctgatcagcgatgctaaacaggggtaccgcttcgttctggacgctgatatagccagtttcttcgacgagattgaccacgatgtggtgatgtcttgcgtgcgagcacgcatcgccgatggtagggtcttggatctgtttgaggcatttcttaaggccggggtcagtgaggacggtgaagtttctgtccccgataaaggtgtcccccagggaggcgttatatctccgtggctgtccaacctcgtgttggatcatttggacaaagccatcgagaaggaagggtggcgccacgccaggtacgcagacgatttcgtcgtgctttgtcggtcccgagaagaagcccagagggccctcaccgtggtaaaagaagtgttggaaacgctcaagctgtcattgcatgagactaaaacacgccttactgactgtgagcagggcttcgaatttctgggcttccactttcggcactatagactgggcattagggaatcctcaattgaaagatttaaggatagggtgcgggccctgacaagacggtggcaaggcagaaatgtggatgcagtgcttgcagatttgaatcccgtgctgagggggtgggctagatattttggcgtagccgaggttagtcttacatttagatatttggacagctggatcaggatgcgactgagaggcttcaagtacaaacggcgctgttatcatgataattggagactgccctcaaagcgcctcaagcggtggggtttgctgtctctgcagcagtgcaggccgcaactgcggctctcctatgctagagccgtaggacctgatatctga

SEQ ID NO: 756 - DNA, 1851 bp, synthetic construct
  source 1..1851: mol_type = other DNA
atggactacaaagacgatgacgacaagtacccctatgatgtacctgattatgctgccagcaatttcacacagttcgtccttgtagacaacggcggcaccggggatgttacagtggccccgagcaatttcgcaaacggcgtagccgagtggatctcctctaatagcagaagccaggcttataaggttacatgctctgtaaggcagtcttccgcacaaaatagaaagtacacaatcaaggtcgaagtgcccaaggttgctacacagaccgttggtggagaggagttgccagtggctgggtggcgctcctacctgaatatggagttaacaatccccattttcgctaccaattcagactgtgaactcattgtcaaagctatgcaaggtcttcttaaggatggtaacccaattccaagtgcaattgctgctaattcaggcatttattctggcggcagcagcggcggctcaagcggaagtgaaacacctggaacttccgaaagcgctacgcctgaatcttctggtggatcttctggcggatcttccgcatgcgtcgacgaggtgacacggagagacagagtcaaggccggcctgctcgagaatatcctcagtcgagacaatatgctggccgcccttaaaagggtgaaagctaataaaggtagccacggagttgatgggatgaaggtagacgagctcccggcctacctgaaagctgcctggcagacaattagacagtcacttctggacggcacgtatgtgccacagcctgtcaggcgcgtcgaaatgcctaagccagatggcggggtgcggctgttgggaatccctaccgtcctggataggttgattcaacaggcaatcgctcaaattttgtccgatatattcgaaccagggttttcttgtcattcatatggtttccggccaggaaaaggtgcccacgatgccattagagccgcccgcgattacattcgcgccggctacgactatgtcgtagacatcgatctggagaagttttttgatcgagttaaccatgacaaactgatggcacgcgtggcacggaaagtggatgacaaaagagttctcaagctgatacgccggtatctgaccagcggggtcctggtgaacggcgttcgcgtggcatccgaagaggggactcctcaagggggacccctcagcccccttctcgctaacatcctgctcgacgatttggataaggagctggaacgaagggggcttaaattctgccgctacgcagatgattgtaatatctacgtaaagagcaagagagctggtgaacgagtgatggcttcaattggaagatttattcgggaacggctttctttgaagataaacgagaacaagtctgctgtagacaggcccgctgccaggaaatttcttggattttctttctatcgcaaaaaggacgacgtgggcataagaatccatcccaagagtgtgaagagattcaaggagaaaattaggtccatcaccaatcgaaattggtcaatgagcatggacgaaagattccgcaggctgcatagcctgtgcgcaggatggattcggtatttcggccttgccgacgcaaagacccacatgagagaactggatgagtgggtcaggaggaggatcagagcttgcttttggaagcagtggaagcggatcaagactcgccacgacaacctcgtgaagttgggtgttgattccatgaaagcatgggagtgggccaacactcgcaaaaaatactggcggatagcaggctcttgggttcttgctaccacactgactaatcaggtgctcgaagacatgggcttccgaaatctctccaaactttacagtgagatgacatatagtgatatctga

SEQ ID NO: 757 - DNA, 1830 bp, synthetic construct
  source 1..1830: mol_type = other DNA
atggactacaaagacgatgacgacaagtacccctatgatgtacctgattatgctgccagcaatttcacacagttcgtccttgtagacaacggcggcaccggggatgttacagtggccccgagcaatttcgcaaacggcgtagccgagtggatctcctctaatagcagaagccaggcttataaggttacatgctctgtaaggcagtcttccgcacaaaatagaaagtacacaatcaaggtcgaagtgcccaaggttgctacacagaccgttggtggagaggagttgccagtggctgggtggcgctcctacctgaatatggagttaacaatccccattttcgctaccaattcagactgtgaactcattgtcaaagctatgcaaggtcttcttaaggatggtaacccaattccaagtgcaattgctgctaattcaggcatttattctggcggcagcagcggcggctcaagcggaagtgaaacacctggaacttccgaaagcgctacgcctgaatcttctggtggatcttctggcggatcttccgcatgcgtcgacgacggatccaagcttaaggtgaaaagcttcgagatcccgaaacgacttgtttatgaagcttgggaaaaagtaagagctaataaaggagcccctggggtagacgcagtctcaataaaccagttcgccgccgccgaagccgataatctgtacaaactctggaacagaatgagttctgggtcatatatgcctggggcagtacgcgctgttgagatccctaaggaccatgggctgggtgtcaggacactgggggtggcaaataccgcagatcgggtcgcccagactgctgcagccatgctgcttgaggagagactggaaccaatctttcatcccgacagctacggttaccggcccggaaggtccgcccatgacgctcttgctgtggcaagaaaacgatgctggtctcaagactgggttattgatctggacattagggctttctttgactctgtcccacatgatcttcttctgaaggccgttgcccaccacacagaagagcgatgggtgctcctttacattgagcgctggttgaaggccccaatgcagatgcctgacggcacccttgtggcccgggagcggggtactccacagggatccccgattagccctctcttggccaatttgttcatgcattacgcattcgacagatggatggcccgcgaccaccctggctgcccatttgagcggtatgccgatgacattgtcgctcactgcgattccaaagaacaagcctgttccttgctggccgctatcgccgagaggctgggagctgttggcctggagttgcaccccgataaaaccaaaatcgtattctgtaaggatgcaaacagacccggtacaagtgaacatactagcttcgattttctggggtacacgttccgaggaagactcgcaccaggccccagaggctacttcgtgtcattttcacccgctatgtcaacaaaggcaaagaaggccgtgggtcaaaaagttcgagcatggcaccttaaccgccgcaccggcaccgatttgtctggcctcgctgaagatataaacccacacgtgcgggggtggataaattattatggagctttttatcggagcgaactccacagtctggcacgcaggatcgacgagcatctcgtccgctgggctatgcataaatttaagcggctgagaggcaagcccagcagggcatgggattgggtggctgccgctaggcagagacagcctaagctgtttgctcactggcacctggtgtctagtactaggggcaggcttgtgggagccgtggatatctga

SEQ ID NO: 758 - DNA, 1806 bp, synthetic construct
  source 1..1806: mol_type = other DNA
atggactacaaagacgatgacgacaagtacccctatgatgtacctgattatgctgccagcaatttcacacagttcgtccttgtagacaacggcggcaccggggatgttacagtggccccgagcaatttcgcaaacggcgtagccgagtggatctcctctaatagcagaagccaggcttataaggttacatgctctgtaaggcagtcttccgcacaaaatagaaagtacacaatcaaggtcgaagtgcccaaggttgctacacagaccgttggtggagaggagttgccagtggctgggtggcgctcctacctgaatatggagttaacaatccccattttcgctaccaattcagactgtgaactcattgtcaaagctatgcaaggtcttcttaaggatggtaacccaattccaagtgcaattgctgctaattcaggcatttattctggcggcagcagcggcggctcaagcggaagtgaaacacctggaacttccgaaagcgctacgcctgaatcttctggtggatcttctggcggatcttccgcatgcgtcgacatacagactaaaagtcaagacataacaaagcgccaggtttgggaggcttacaagaaggtgaagagaaataagggctccgccggggtggacggtgtggactttgagaccttcgaggccaatctcgagaacaatttgtataagttgtggaacagactgtcatcaggcagctacatgccacccgctgtcctgcgggttgaaattccgaagtctgacggcggagtcagggttctggggatccctaccatcgcagatcgcgtagctcagatggtggtgaaagactacctcgagcccaagttggaaaagatcttccacaatgattcctacggctatcggccgaaaaagtcagcacaccaggcactcgagactaccaggaaacgatgctggcaatacccatttgttctggacctggacatcaaaggattcttcgacaacatcgaccatgagctcatgataaaagcactggaactccacatggacaccaagtgggaaatgctgtatattaaacggtggctggtcgcccctgtgcagacgaaggaagggcttcagcagcgcgaacgcggtacacctcaagggggagtaattagtcctctgctggccaacttgtttcttcattatgcctttgatgtttggatgcgaaagaattatccaacaattccattcgaacgctacgccgatgatgctgtctgccactgtaggtctcagagggaggcccagcagcttaaagctgatctgtcacagcggatggaagcatgtaaattggagttgcatcccgacaaaacaaaagtggtgtactgcaaagatgataagagaaggggagaatacgagaatgtgtcctttgactttcttggttttacttttcaacctcgggtagcaaagaactctaaaactggcgagtttttcgtcggcttcaacccagccatctccaccaaagctgctaagagaatcaggctcgtgatgcgcagatggaaggtccagctcatgagccatctgtctctggaagagctgagtgataggcttagtagggtgattcgagggtgggtaaattattacagcattttcgctcgacacaagcttcttgatgtgatgcgatatttcgataggagactggaaagatgggccaaacggaagttcaaaagccttaaacgcagacaaggaagagctcacaagtggcttatgcggattgcacggaaagagcccaacctttttccccattggcagatgaaatatgccaagctcacagtcagagatatctga

SEQ ID NO: 759 - DNA, 1881 bp, synthetic construct
  source 1..1881: mol_type = other DNA
atggactacaaagacgatgacgacaagtacccctatgatgtacctgattatgctgccagcaatttcacacagttcgtccttgtagacaacggcggcaccggggatgttacagtggccccgagcaatttcgcaaacggcgtagccgagtggatctcctctaatagcagaagccaggcttataaggttacatgctctgtaaggcagtcttccgcacaaaatagaaagtacacaatcaaggtcgaagtgcccaaggttgctacacagaccgttggtggagaggagttgccagtggctgggtggcgctcctacctgaatatggagttaacaatccccattttcgctaccaattcagactgtgaactcattgtcaaagctatgcaaggtcttcttaaggatggtaacccaattccaagtgcaattgctgctaattcaggcatttattctggcggcagcagcggcggctcaagcggaagtgaaacacctggaacttccgaaagcgctacgcctgaatcttctggtggatcttctggcggatcttccgcatgcgtcgacaacctgtcaacccctgagtccgtgcagaaactccagacggccctgcacacaaaggctaaggaatcacctgattatcggttctactgtctctacgacaaggtttatcgagctgacgttcttgctcatgcctatcattgctgcagagcaaacggcggggccgccggggttgacggtcagacgttcgagtccattgaatctggtggccttgatacttggctcggagaattggctaaagaacttagagataaaaagtacagaccagaggctgtcagaagggtgtacatccccaaaccaaatggctccaaacgaccacttggcatcccaaccatacgggatcgggttgctcagatggccgcagtcctcgtcttggagcccatctttgaagccgacctggagccagaacagtacgcttatcggagagatagatcagcactcgacgccgtcaagaaggtacacagtttgcttaacaccggccataaagaggtaatcgacgctgatctcagcggatactttgactctatccctcacgctgaacttatgaagtctctggcacgccgcatcagcgatcgccacgtgctgcacctgattaagatgtggttggaaggaccggtcgaggaatcagacgagcgaggaaacaagcaccgcaccacacgaaataaagatgaaggtcggggtacaccccaaggcgcacccattagcccgctgttgtctaatctttacatgcggagattcgtgctgggatggaaggctctgggccatagtaagagactccaggctcatatcgtgaactatgccgatgatttcgtgatatgttgcagggggaccgcccagagcgccatgcagactatgaccgacatgatggtgaagctgaggctgacggtgaatgaggccaagacacatgtgtgtagggtgcctgacgaatctttcgactttctgggttatactatcgggaggtgttggagtactcgcacagggcaaccatacattgggacaaggcctagtaaaaaacgcattgccagggtgtgcgagacaatatccgagctcacttccaggaggtggctgctcctcgatgttgatgagcgcgtcagacgactgaatagaactcttattggatgggccaattatttttgcttgggccccgtaagcaaagcttatcgggcagtagatgcccacgcaagataccggctgcggcaatggctgcgcgcaaaacacaaagtgcgaggggccggaaccgctcagtaccccgacgagtacttgtatgcaacacttggcctcgttgagctggcaaggcgaacccgagactttccttgggccaaggtggatatctga

SEQ ID NO: 760 - DNA, 1953 bp, synthetic construct
  source 1..1953: mol_type = other DNA
atggactacaaagacgatgacgacaagtacccctatgatgtacctgattatgctgccagcaatttcacacagttcgtccttgtagacaacggcggcaccggggatgttacagtggccccgagcaatttcgcaaacggcgtagccgagtggatctcctctaatagcagaagccaggcttataaggttacatgctctgtaaggcagtcttccgcacaaaatagaaagtacacaatcaaggtcgaagtgcccaaggttgctacacagaccgttggtggagaggagttgccagtggctgggtggcgctcctacctgaatatggagttaacaatccccattttcgctaccaattcagactgtgaactcattgtcaaagctatgcaaggtcttcttaaggatggtaacccaattccaagtgcaattgctgctaattcaggcatttattctggcggcagcagcggcggctcaagcggaagtgaaacacctggaacttccgaaagcgctacgcctgaatcttctggtggatcttctggcggatcttccgcatgcgtcgactcaaatagactggatcaacctgctaacgttaatgagtctgaccacgaacgaacccgccttagggctagagatgtggtgagggacgaggggatctcttctctccaagcccttcagcgcgtactttatcgaagtgccaaacaggacccgacccggcggttccacgccctttacgataagctgacacgcagcgatgtgatgtggcaggcttggatcaatgtatctacgaaccagggcgcacctggcgcagatggagttagcatagatgccgtgacggccgggggatacgaaggtgtaacatcatttctggatgaactgagcacagaagtgaaggccgaaacctaccggcctcttccccttcgaagggtccacatacctaaggccggaaagtctggagagacaagaccattgggcatcccaagcttgagggacagggtgttgatgtccgccgctaaacttattctggagcccatttttgaggctcagttcagttctactagtttcgggttccgccctaagcggagcgcacatgacgctctcgaggttataaggcagagcgctaacagtggtgcccattgggtgctggacgctgacatcaagtcctgcttcgatgaaatcgatcacgaagccctgatggcattgatcgagcgaagggtgtcagacagagccatgcttaaacttctgcgctcctggttgcgcgccgggatcattgagggcggggtgtattcagacagtgacagtggcaccccacaggggtcccccatctcacccctgctgtgcaacatagctctttccgttctggatgaggcactcgccaaagccaaatcacaaacagggagtgtggtacggtatgctgacgattgggtcgtcctgtgtgcaaccaaaaagcgcgctgagactgcacgatcaattgccgaggctgctctcgccccactcggcctcagattgcacccagaaaagactagaattgtccatctcacaagaggaactgaaggctttgactttctcggctttcaccaccatatggtcgagtcctggaagtggcctgggcgatactacctgcagagatggcccagcgaccgcgccatggccagcattaaggtgaaagtgagagaaatgaccgacagaaggtacgtcggattgtctctcgacgatgttgtcgatcggttgaacccggttctgaggggttgggcaggctatttcaggagaggtaatagcagtcggaaattcaatgttatcgattcttatgtggcagaacggatggctattcttgcttccaacaaatatggtctgtccggacgaaattggggcactcggtttagctatgagtggtttaaatctctgggagtctacgcactgtccggaaaggtgatttcacgaaccgcacatgcacaggatatctga

SEQ ID NO: 761 - DNA, 558 bp, synthetic construct
  source 1..558: mol_type = other DNA
cgactcgttgttgattaatagctttgtgatttccgcgcttttattcactcgagtgctacttggtgggttatagctactcgcgagcagtgagccctgaccgaacgtctctaggaaggggttcagccgtctgtcggatatccggacggtatctgctcgtgccaaaagggccacgctcttggatctcgtgaggtgtctcaactggtcttggttgggaaccgttcacgcacgagagcctttcgaggtgcattcctacgtggagtatctccaaaagctggcctaaagccttcctacctgttcaccttccataggtgcccgctgttaagctcttcggagtgaaccaaggaacaggaggtgggggtgagcgtaaggtgttcgggaccgtgccgaggcgcgtggcaaccgcacctaacaggttgtcgtgaacggcccccctctgctttgtggcgactgcagagtgatattgctggctcggaccttggggcggttggtggcccgagtcttgtgccttggaaccgcttgagttgacgcatcgtgggaaagcttgtatacaaaaccact

SEQ ID NO: 762 - DNA, 254 bp, synthetic construct
  source 1..254: mol_type = other DNA
tgaaacagggccggaataaagacaggcgttcggagacgtagtcttgaaaagatgcaccaggaaagtctccctataacattctacttcgaggagactgtcacgggtacgctgtttttagtgcccggactcaattggtgaagcagtaaccagcaaggtctcccgagatgaagactatagatggagaccgttacgggcacgctgtttttagtgtccgaacaccaattggtgccatccgcgaccctgtctgaggtaac

SEQ ID NO: 763 - DNA, 216 bp, synthetic construct
  source 1..216: mol_type = other DNA
cattttggccctctatcttttgggcctgtcgtttcacggcagagcctacccccaaccaccacaagggggaccacggccggcgggggagaaaaacaaaaggctaggccttccatcggggccaagaagtcaaattctggttcccaacccccgccacacgtctgtacgacgtgcgaggcaaccttccagacggaagccattctgaagagccatctgctc

SEQ ID NO: 764 - DNA, 147 bp, synthetic construct
  source 1..147: mol_type = other DNA
tggctcctcccacccagctgagaccgcccatcgtcacgtctcattcgtgggacgcagcaacagagtgggggaagtttgcgaaggcgccttcgcgccgatatttttaacagcgattcaagctgaaatgtagccgtgtgttatttaacc

SEQ ID NO: 765 - DNA, 170 bp, synthetic construct
  source 1..170: mol_type = other DNA
cgtcatcctctggctctcgttggagggtggcgaagtcggatgcacgcgccttgacgtggcggggagcttacttgactgattctgtggggcttgttctgtggacaagttcctatacggtttcggagattcaaaactaagcgtgcgacggcggacccgaataatgactaaaa

SEQ ID NO: 766 - DNA, 263 bp, synthetic construct
  source 1..263: mol_type = other DNA
tcccagtctcggaaccgcgttcatgacaggttaaacccatggcagttcccgtccttcataaaggaactgtccagtgctaggcccgaaaggccattagctgggaagtccatgacctcgatcaccctgtccgttccggaagcgcgagtgtatgagctagctccagctttggagaaacatcaacctaaatggagcgaaaaccgtacgacctatatgattcgaggttgataacatcaaaacccaagtatgaggggagtacggggtac

SEQ ID NO: 767 - DNA, 291 bp, synthetic construct
  source 1..291: mol_type = other DNA
gggtttttttatttcaaacgtctctagagataaaaataacttagggtcccttggctcagagtctcgacacgcaagtgtcaaagagtcagggtaaatgtcctgctagcgtacgtccgggagactgttcccacgtagagtcggttattggtatatagcacaaggagtatgtcagaaccctgtgtgaggatcatgagttaaatcatatctaattatatctcgagctaaaccgcgaacaggcaccacctcattgctcaagtcctggatgaaggtgtgtatgaaggcaaaacaatc

SEQ ID NO: 768 - DNA, 478 bp, synthetic construct
  source 1..478: mol_type = other DNA
cgaatggcagaggccaggtagcttgaccgggtgtctgctctattatatgtgacggataagggtcgtaatagagcaagaatcatggcaaagattctttgtagagtaagcgtagtgctatccttatctagctggaccctgctagaaacggtccaatctattatatgagtcggatgggggtcgtaatagatttagaatcaggagattctatgtagcgtacgtgtaatgcgatccctgtctagagggtacccggctataaaaggggctggtagcgcaaagtgggaatcgatgattaaattattcccattggatcgttgtctaaaatagacaaactgtatcgacgcgtcactaatcgaatggcggatcagcttatggtccaaggaatgtgatgactcttgaaaattgagtacttgtactcgtattcaacctctctatccgtggtttgcacggagaattgcttaaacggtgtttttgtattaaa

SEQ ID NO: 769 - DNA, 1117 bp, synthetic construct
  source 1..1117: mol_type = other DNA
cgaggtgtccctatccaccatcgggtttcagaaatcttccgaggacaacgtccgagtgctggctgtctggtctgtatgacttgggccaatcggtaaccgatagccgatcctccctgagggcaccacgttgcagccggtaactacagcggtctacctgttgtccatggcaatgggggaatggttgtaggctaactgtcccgggagcggcgatatcctacggtatgtgtcaggatctcgtcgaaggtagagaacatcctaccgaagcctgaatgaagggtaagttttgacttcctgacaggcggccttgacaggattcgcaccgaatcctcgaaaggtaagctgctgcgtccataacgcccgtggagcacagtcatactcggtgcgagctcatagttaacagtaatgatctcgtgtcgtcagccgcagaggggaatcacccgcggtaaccgaggggaactacgatccgtcgccattcctcgaggcccgaatgacctcagcgccacctgctaagggcaaccaaagctggtggcaatgagatgacgggaacaaataataagacctgctgttaacaggcaaggtgctagcctccatccaggctaaccctcaatcctgaagtgaaagggcggcaatcctttcatggaaggaggccctctaccgcgttcaaccgacggctaagggcagctaggcaaaatcactgagaccaaccagtcactatgattgagccggcaggggggcgggatcctgagtaccacgagttatcgggaccgtcctgagggattttccaaagcatcggggaaactctagcaatagttaacactattgatagagtcaaccgtagcacttaatagagacgactcgtggtcgccgggggccttcggtgggtacggacaccgactagccctcgcaggatgtggtcagtccacgtgaagtggaaccaactggccatgtctaagtggaaaggcaaacccttgccggggcgagctaagtacacaaccgatttcatccgggcgccgtacagcccgactcattcgtacatgataagtagggattcgttagtttcggtccatgcgtctggttttgggaacgtttttccggaaaaaacaccaggcgattacga

SEQ ID NO: 770 - DNA, 189 bp, synthetic construct
  source 1..189: mol_type = other DNA
actagataattatttggtaactcttttatactttgttttgttaacaatagtttaaatttttcttttcagtctactaacctacttacaatagtattccttatatctgctgctgttaactgttatactgttgctgacattgaacaatggatcacttttgcttaaggtgaccattggtctttggaattgaat

SEQ ID NO: 771 - DNA, 117 bp, synthetic construct
  source 1..117: mol_type = other DNA
cttctgttaacccgctacgtccggacgaaagtccacgtgagagtcggtaacaaggattcgtagtccttggctaaaagcgggaacggacaaggggctagcgacccccaattctcaaat

SEQ ID NO: 772 - DNA, 159 bp, synthetic construct
  source 1..159: mol_type = other DNA
caccagaaagaggacgtagtggggatgtgtctgcttcagacagatgcattgcccagagtagatgtgacatgtgggaaggctcattatccgtggcgcactcctaccaacgtaatctctgcgtcatcagagagaaaatgatcgaaagatcatcaatccaaa

SEQ ID NO: 773 - DNA, 141 bp, synthetic construct
  source 1..141: mol_type = other DNA
gtcgggatggcagaactacttccttgtagtccgacctgggcactagtcgtagtagactagtggcgaaacgttctgtccctcagcgttgggcgggagcgtatattcccagcgctgttgtattgtgcgcgttaattgcgaatc

SEQ ID NO: 774 - DNA, 257 bp, synthetic construct
  source 1..257: mol_type = other DNA
cgagattgtactgtagccgtgaacggcggtgagtagcatcggagtcggtccccccgcactgggcacccgggaaattggttgctaactttccggaaagttataatgggaatcctcgtggtttatgttatgtttattatgtgattgttggacatgatgatattattgttttgttgttattataattgtgatttgatatatttgtttagtccatcaattgtattaatgtgttatttaccacttgagtgattaaaattctc

SEQ ID NO: 775 - DNA, 830 bp, synthetic construct
  source 1..830: mol_type = other DNA
tactcaggtgatgcgcatttggtaaagggttacaagccagtggccagaatacacctcgtgaagagtctcaggactggattttatttttatcagagttactacccgtcgcagggtctctacgcgaacgttttgtgcatgatggagtcgcgtccctccgtcctcttcatacagcggccgagcgatcactggatggtgataatgttgccttggggtagctgctcggtatatagcctctggattccttagactgtaacatgcgttctcgttcgcgcccgtgtcaggtctacggactgtcagaatgttgtcggtcgagatccggtcgccttaacccaaaggcgtccggggaagagggaagtgcccatccctcggaggaaataatttccaagccaggagaccttcctagagcactagttgagttacgatttacctcaaaagggggacaaatgccggcctccacagagagtccagtgaatgggctcagccgtctacggcagggtagccgaagccttgagcaacccaaagtaagtgtcataccgcacccaacggtatgtcgcaaggcgtgacattaacgtcgtagggccctaggaggatagccctggaaagcacaactcttcgacgaggcccgtctgctattcctccccggtgactaaggaccgtaagccggagaggcctttggaaaatcaccactaggtcggtagctaggtttcctagcgccgaccggagcggcacacccgctcatcgggcccctaaaaaggctcaagtttgcatgggtcaaccccccctgtaaactaatcaactgggttactaacattgaaataaatattaggaac

SEQ ID NO: 776 - DNA, 437 bp, synthetic construct
  source 1..437: mol_type = other DNA
tatgaggaggagccgcgccaccccgtggtggccggtccgagtatggttgggaccgtttctatttgtgacccgatctacggggtccttaaaaatactgagataatgttcgagggaatcgcctttatggtcggtcccggcccgggggggtccagtgcatagcgcgccgtcgcgtctatacatcgcgtacgtttggtttttcgtcggtttttggagaattacctgcgccgtggtcgtcatgcctcgttgcctcgtgtctcgttttgcgttcacgccgctcggtagtgcgtgaatgattgtgggtagtctcgttgatctgaatatgattaaactcatgacgtagaagtcactcaggtgccatgtatagagatgctaggattgtgcgatgtattgaatcataactcggggtacgggtatgattattaaaggaatcgaatact

SEQ ID NO: 777 - DNA, 526 bp, synthetic construct
  source 1..526: mol_type = other DNA
ttctcgagccaagagaaacttctcaccagcgttagttaaggtacgaaatggccctcgggtctaccttgtcgggggtgcttggcctccacatagggcttacttcggtaagtccgtccacgcacggcagggaagccgttagccgtcatcgcaactcaaattagtcgaacggtgcagccaacaccgcaaggcgaggcgcttgtaggagcgtcgaagggtattggaatggatatcctcgaaggtgggatttctacgaggaaatactcaccattctttcccggatactggagccgatagtgtggaaagcacttggataaacaacaactggccgggcagcaaggtttccttgccccggcccggacgacgaactcgtccaccgggtccgtaaaacgacccaacgcttgcctggcctaatcagcccggttgtgcggttaaaacgtagattccgaagtataacgaaaacaaaggtgactcccccaggagtcgctctctgcgtgtcggagagcaaaatgcagccaatgccggcacc

SEQ ID NO: 778 - DNA, 460 bp, synthetic construct
  source 1..460: mol_type = other DNA
aggtgagccgcgctgccgcaaggcagccggtccgagtatgcgtcggcgttggttgcgcaaatacgccctgagctcgagggctttataaatgcttgagctaatgtccccaaaaggggtcacttcattggtgcatgctgaccgcaaggggtcaatgcacggcgctctcggggaaccaaggtcgttggttgatccaaaaaggattatcgatgcgttccgagagacgcgattatgcatattattaacgattctattctcgaggatttgtccgcttctagacggacccatcctcgaccacgaatgaatcgaacggtgtgttccagtcgagtctcttgatccacgttgatttagcccgatggattggccactagcctgtcggttcttgagagagcgcagtgcatggattataattgccgagtcgcatgatccaatgaagtggtaagtgggaatcaggggataacac

SEQ ID NO: 779 - DNA, 475 bp, synthetic construct
  source 1..475: mol_type = other DNA
ggcggagtaaggagccgtgttccgacgttgtgaaggctccacaaattagcccgtggcaaactccgcggtaggcagggctccgtgaagggcggtggaggatctccgtgggaggatttatccaaagatggagaccaccgtctgacacgttgaataggcctaaatctaccccagaccacctcctcgttggtgcaaccggtaactgcactcggtgcaggctgacggtcggggatagtcgtagagggaagcaatcgaaacctctatgttccttcagattcgcccgcggcagtgcccacgcttgggctagttaaactgctgccctgctaaggtagagcaggtgaatactctcccgggacctgtgggttgactcccccttgccccgttcctatgtgtcacagaaacaaatagatcgcaatctgcaaccgaggaaaatcttagccttggaacagatacagaggaccacgcgaccgtaggggtg

SEQ ID NO: 780 - DNA, 179 bp, synthetic construct
  source 1..179: mol_type = other DNA
gaagaaaagaacggaaccgccacgtggaaacagggagaatggacatttcacctaatgacttctgacaggagaacgatgccgatgagatgaccacagcccgaaagtcgcagacgtaaaaggaatcagaagacgataccttccactctctatcctagcgcggatagatgagaaatagtaat

SEQ ID NO: 781 - DNA, 233 bp, synthetic construct
  source 1..233: mol_type = other DNA
gtaaacggcgggagtaacaatgactctcttaaggtatccaaatgcctcgtcaacgtttagtatagggaaaagcgcgggtaaacggcgggagtaactatgactctctcggatagggattggcagaactacctccacgttggtcctatccggggactagtcgtaatagactagtcgctaaacgttctgcccctcgccgttgggcggttgtttccagcggtgttgtatgtgcaaaa

SEQ ID NO: 782 - DNA, 264 bp, synthetic construct
  source 1..264: mol_type = other DNA
gacagaacgtggatgttggcaactgtggttagtccagggtgtggacaaggttatatattgcatttttaccgcttatatgtgaggttcgtggccagaaggcccctatcattgcccctcagagcagatctgataatagggaatcctcgcaggctaactattatattatattgttttgcactgttatgttattactaatttgttgttgttatattgcattgtataattttataagttggattagcctgcttgagtgagtaaattctc

SEQ ID NO: 783 - DNA, 244 bp, synthetic construct
  source 1..244: mol_type = other DNA
ttatatatttgaacggaagctggtctctcctatggaagctagctatgtgctggccggttcaaatagtggcactcactaacagctctatctcagggaaagtagatgagctcctgtgcatctggttccagcgatgaagaccttcagagacagtctaagccgacaacgtcagtgtttcggtattggaagctgtctgtcactgatgaaattctgaccgggaacggcataccagaacctgagtttccag

SEQ ID NO: 784 - DNA, 159 bp, synthetic construct
  source 1..159: mol_type = other DNA
tatgaactaactagacaaatgtctccgataaccatgcactgattcactgttcgctgctcatttcatccgctcccagttctatgcattttctgatcatcatgacacccttgtgttgtccaacatcatgcacttttcagctcttgtgtagaatagttctcc

SEQ ID NO: 785 - DNA, 420 bp, synthetic construct
  source 1..420: mol_type = other DNA
tgcgcgaacgcgtgtttgtcgtcgcagcgcactttacggaatttgggtctcggccgtcggtcgcccggctcggccggcggcggggctctgtgaacgaacggtctcgtggaacgagttggacacgtgtagtgtgttatcaaccagggtttgtttgcctgaaatgtgagacgtaggtggaggcgtctcaggggcgtgggtttgggccgtccgggagaaatccagtccctaccggctagaggggccgttagctgctgaaagtacctctgataccaaaaatgtccggtagcaaggttctcttgttgccgggcattgagacagcggtgtgaaagtctcaggggcgatggtatgggccgtcccgggaggatagccactacgaggtggtcctatcctgcccatcccggctaaaggagccgttagctg

SEQ ID NO: 786 - DNA, 407 bp, synthetic construct
  source 1..407: mol_type = other DNA
cggtgagccacgctgtacggcattacagctggtccgatgataccacggggccgttccatttgtcttgatctcggagacgttaaataaactgagacaattttaagtctaccatgttacctcatgttcccgcccggcgggggtcgcggtgcgtcgcacctgtgtacatattttacggtctgagcgactcggctttgagtcacggccatgggttacgggttaccatactttgccacatacgctagtccttgcacgcccccggtggcgtgtgtggggcagtgggtctctcgcaatccgtgatgatttgagcccgtcgttgctaagctgtactttacggtagcgttaggtcgcgtcgaatcgcgattgtaacgccggtctcgggtacggttttgacaaggtacttaagcaaa

SEQ ID NO: 787 - DNA, 190 bp, synthetic construct
  source 1..190: mol_type = other DNA
gcgccttctaggttgttaaaagtcagggccgtcccggtatcacgctaaatttacccgtggccctggggttatcacccccttacgaaccccatcagctacgaacacaataaatagcataactaaccttagggaaaactcatccccaacggtagtaacagatatatcgtctaatctgtgggtcctctatcct

SEQ ID NO: 788 - DNA, 185 bp, synthetic construct
  source 1..185: mol_type = other DNA
cgcaactcgagctgacaaaggcggcactggtagaaccccagattggatcacacaattaggaccccatcgcaggtgtatggtgggtggggtcccactctccatcccaagacggccacattccgggcaagcccctgtactaatggggtaggtcgggtgtggttgtcaaggggtggatgagaaacaga

SEQ ID NO: 789 - DNA, 430 bp, synthetic construct
  source 1..430: mol_type = other DNA
tccgacaataacaactggtaatggttttgatacaggtaaggaataggtaagtacagtttgagggttgacgtattcttttcgtccttcccaatggactgacctttccggtgtggctggattgtttgttgccagttatcagccatctttgagtccaacgccagtttggcatgtttacttagtaaacatctgaaaagatgacactgggacgacacttggccgggccttttactagtgttcgttagaattaagagactacgtccgcgaaattcacatcagttgattttccacgttgccccgggagggtgaagtagacttgttgttcttgtacggttcttctgaaagtattgtgtgtgggcaaccaaacataatagccgaggaggaacacgataggtagacaagtcgagtaactctgctaacagtctcgctcagt

SEQ ID NO: 790 - DNA, 173 bp, synthetic construct
  source 1..173: mol_type = other DNA
atgggcaaggacaggacatttattgaacactctatcttggtaaaagttttttgttattctttagttttttgtatttgtctttatacctgtaatgtgattggatcatgaacatttcattttggtaattagtaagatgttttatgacggcataacatgatcgctacatccctatt

SEQ ID NO: 791 - DNA, 684 bp, synthetic construct
  source 1..684: mol_type = other DNA
ttgagttgtagttgctggatcttggtctaagtcttaatcgcttggatcttggttcgcgtggctggcctcctcgtggtctcgctggaaacgtcagaaatgacggctaaacagccacttacttgagcccaccgtgttagtttgcagtagcctctgttaggtgatttcctaattgaattaccggcagtgtgcgactgggtatgttgtggtggtgtggctcagcgcgatgcgcaaactctagcgggtgtgatctagctatccggccagatcctaattctaatcacactgacctctggtctttgtgtgtgacagcccttctagcctctaatctgctggaagggaaccgcaggctgaaaacatatcatttatggcgacggctaatgtcactttggatctaaatccttctgctcggcaggcggctccccctagtattcacgggtgaaaccggatgaagaaacggcggtaaaatagctgtttgtcgggtacaaggtgtagtgtgggttggagggaactccggcctgcatacggccgcccgagtggtgaacaagacctcgggccctggtgaaactgtcgtaggagacggtgtcatatggtagtaccagcttcacctgatatggcagtagtagcggtcgtagtctccaaccccattgagccggggggggacctacgagagttctagatacaacc

SEQ ID NO: 792 - DNA, 370 bp, synthetic construct
  source 1..370: mol_type = other DNA
tgtccaactagatcaagcctggcgacgatccctccgcactgattgggatgccggatcaaatgcagtacaaacgctctcctgagcttagttgcaccccccataactctgggtaaggtgtatggtcccccaatcagtgtttgagtgaggatgagccagtgaatattgtccaccggtgtacctgtagtacgtaattgtactactagacggacatttggtgagggaaacagcctcgtgatagattgtcgtgtgatagtgacagggtatcaatgattgcgataatacagccatgcgcgggccgaccagcgtgtttgcctcttcccgtcccgctttgcaggacgtaaacggtgcgaaagtagccgcatcgagaacc

SEQ ID NO: 793 - DNA, 558 bp, synthetic construct; identical to SEQ ID NO: 761
  source 1..558: mol_type = other DNA

SEQ ID NO: 794 - DNA, 254 bp, synthetic construct; identical to SEQ ID NO: 762
  source 1..254: mol_type = other DNA

SEQ ID NO: 795 - DNA, 216 bp, synthetic construct; identical to SEQ ID NO: 763
  source 1..216: mol_type = other DNA

SEQ ID NO: 796 - DNA, 147 bp, synthetic construct; identical to SEQ ID NO: 764
  source 1..147: mol_type = other DNA

SEQ ID NO: 797 - DNA, 170 bp, synthetic construct; identical to SEQ ID NO: 765
  source 1..170: mol_type = other DNA

SEQ ID NO: 798 - DNA, 263 bp, synthetic construct; identical to SEQ ID NO: 766
  source 1..263: mol_type = other DNA

SEQ ID NO: 799 - protein, 1330 aa, synthetic construct
MHHPVPRGGAGAHDDGVTCDRCGKVCKSRGGLKLHRRACLTGGVSGLSSAQAPAGGVVSPDRTSLGKGSSRNGSASGLSSARSSTTDVSRTVSAREGRDEGGNSIVGGLRADALECRVVVERLATTRPPATVSDSVAATIVGGNRADALECREAVDPVPASRPPDSEVASAVLQVESDGLLAAGGPPSDASSPEESRAGVRSRPGVLCGSCGRSFGDKRGLSQHERVAHPADYHSRLAIGHRTGSKRRWTYEEKVLVARAEVSLSGTESLNAKLSLAFPERTFDAIKSLRRNPAYRALVHEIRSEGAGGADGSATASAASDPSGGAGASGVTPECSAQGAPGVPASQEEAIRELADACRADSDALCLSPEELGELIALVDSSVRDPSGPSGQRVQALVDKEYDQWVKSLPIPQPKASQSVPEHSGASSCRGRRRRPRGARPTPGSPGVRTLSKRQQRRRLYGIVQELYRKNRTRCAKTVLSGDWAKEKRTTSLEEQDSYWRPLFEEPSKADSRDPRPVSRALFEISQPVTATEYGLVLKSTHESSPGLDRVDRKVLRGIGPRIGVAHMNLWLLACRPPGAFKVGVTVPLPKSADAADPAEFRPITMATMVCRLFHRLLAHRAERHLPLGARQKAFREGDGLADNVWILRSLIEDCKARHRPLCVTFVDVRKAFDTVSHESVVTAAERIGFPPGLVSYIQCLYTGGVTQLRVGRVLGSPIYPARGVRQGDPLSPLLFCAVMHWVLSQLDARLGLQLAGGVRVNHLAFADDVALMSSCPIAMKRLLCELESGMEMVGLRPNAAKSASLRISVSGKVGKWFCHPEPFLSLAGGPVPAIDIQGSYKYLGIRTGAGRKVGEAVTNKLEEGLEQLSKAPLKPEQRLFFLRVHVLPSLYHETALCKYSKGLLKNLDRKSRAAARRWLHLPHDVPQALFHASPDEGGLGLPELLVQVPLMRRARVEKLFQRATEDRDPVLAAVIGMSRELRRERQRWEGGVPCYSRKVTDRTGRGRATAAALHQSCDGCGLSDTREVPAVSRWVTSGTRVASGKSFVDAVHIRAGCLYSKVRASRGRSGAPGAVDLQCEVCPARRETLAHVVQQCPRSAHARDERHNRVAKLLIQKLTASGFQVEAEPAIKTDYGVRRPDVVAYKPGEKAVIIDVTVVADLPGELSNAHDRKSNKYDDPQIRAWVARRSGVSTTAVSLTSLTFNWRGALHGRSAQDMVSLGVSLGTLEIMSLIVLEWGHRAWRESRDATWIRMDQVPYCPASSRSRDETGPHHHTGGSRRRHLAARPPQPVCPRGTGRHGRPVQAGTPGRGRHQPGPAGARGVVPSSR

SEQ ID NO: 800 - protein, 1201 aa, synthetic construct
MRKCGDRTKCKYCALRLGSFKSIRAHERLTHPVEYTRDINALKPPPDTEVFETLARIEAGSANGYFQKEMSAATGLTIDQVRSRRKKPEYARYLAMAKEALAAARKFKLATPKEPISIPASLPPGDSTRSKSVLPKVDAAPQIQLGPTVPPDQPVEVPVTRECLPPPDPPDSLKSGKRGRSSNSPDGSAPRKRANVDRPSVGQGAVAAAKVVPTPGTSVAPVPCQRTATPSKRKREAPSSDGSSDDDDAVAPRDRAPPRPLLSSPTAGPSWQPSQETAPVPIVYPRTETEPPASPPTPAQPVPRVSPRLERVVSPLTGGAPVASLVGILPQVFADYLRGARQRIPTGHAAVRKIADLALLGSNQELLVAIDQWLDSIISKKGAGKPTGQRGKGLGKRNYGQSRGGRGKRAANYKKAQDLFRKDRKCLAEVVLSGRDMYEPPELPSLRDVEDLYGNILESVSPEDNEVISDPKPQCNTFRPITEEDVRKAMSNWQTSAPGLDRLSIPDVKKVPPIVWSVVLSVIFGRNIHPTSWKELRTTLVPKDGDRKQATNWRPITIGSAAQRLLHRALHARLRDATRLNANQRGFCETDGTLANVLILDHYLGSRVERGSAYNVVSLDLAKAFDTVSHNSILRALKRAGIEGGTQSYVMDSLWGATTTIKVGSEATRPLAIKRGVKQGDPLSPLLFNLVVDEVLDRINAEYRGGTVGSDTNVALMGFADDLVLLSDRQIDVPLMLADINKFFCGRGMATNPKKCVSISAAPFKGDKRPIPVTRSIFSINGQKIPCIDSISSFKYLGHRFGATGVNKPNIPNLQTWLHRVEKAPLKPDQKFSILRDYLLPKLLYGLQNTRVTGAILKDVDRLVRGSVKRIMHMPIHAPDCSIHAKVRDGGLGILELRHAIPQILYGRMTKLLSNAEDPVINTVLQTERLRDIFQRLSKLAGNVPTGQLYREAIINGPQTAGLQAVAEDAASRDWLHQKPQGWTGRDFVRAVHLRTNSLPTRGHPSNPPDQRVCRHKGCTSDETVSHILQRCGAVHDVRIKRHNEIVGKIAAHARKSWQVEEEPHVRHTDGQLFKPDIVIHADHNKTVVCDIQVSWEGNDGLVPAWERKRLVYENQKFLEAATRRWPGKTFHFCPIIIGARGVWPRCNEPAQVGLGLTKQLKSSCVQSALKWGSTLHATFMRRVWANDNAQRRPPIAERAA

SEQ ID NO: 801 - protein, 1067 aa, synthetic construct
MYEEIMLRGPATAGPVIFAEGAAGVEPQMVICELCTRSFQGQRGLHVHQRRAHPPEYHAQHQVLPRVKARWISEESRRMAEQEALLRLSGVQPRDINKRLTEKFPNRSYWAMKGQRKKDSYQKLVSELVLMAPVPESEIPTQTPTGPQVEDPVPMDRSLWKVEVLACIKDLIEKRGSPEEEPLWDSLTSAFVSLSGGTVDLSDVKVCLDLHAKRLTDLLGPKRKRRRPPRKVPRKRTRRFAKTGDEANNSSAADGAAATAAPSKRTRSQRKPNPARIARSQAYGRVQAAFRKNRKRCADMILEGKWEEEATTLRLEEQEAFWRPLFEEPSMPDDRPVLKIPENWQIVDPISIGEVVKALADSEESAPGSDEITLVSLRSVSPSMLAASYNLWLLAGFCPDRFVIGETILIPKDGDLKNPANYRPITVASRVTRVFHKIIAARLTNSVPLDPRQKAFRPVDGCADNVYLLDSLLKDAQRRRRPLNLAFLDVAKAFDSVSHYTLARCLRRQGVPEPLVEYVCGTLANSSTVLKVQGRKSTPIVCGRGVRQGDPLSAILFNLVIDEVIAGLSKSIGFELSENLVVRCLAFADDLVLVATSADGLRDQMFHVIEGLRNGGMLINPDKCASLRIDVDGRAKRWVVNPSPFLVLQDKQIKALDIVGTYKYLGLQAGAKGLRKAYGSFLQEKLDWLSRAPLKPQQRMYILRCHLLPRMYHGLVLGETNSTALDQYDRMVRRTIRKWLRLPHDTVAAYYHAKVVDGGLEIPRLRYSIPVMKNRRMAKLESSLDPVMQWVANSPCFLGAKVRSSKAAKVVGQTLDTGRDVQRLLANQLHTTADGRGLRHQRQSPHVNNWVRDGSDLLSGGDYLEAVLVRGNLFQTPERATRGRRTVPPMCDAGCNSTCTLAHMSQSCMRTHRLRCERHNSVLEFIVNRAIAMRHDVVREPVIPTRAGRRKPDLVALVDGSVLVVDVTIVSDQWNLNTPFTEKVDYYNTDDIKAWLAASYPGKTCEFGAVVFNWRGALNLKSSALLRRLGVSARDETLLSCRVLTFTANMFKAFTRSTVRKECRSSR

SEQ ID NO: 802 - protein, 1330 aa, synthetic construct; identical to SEQ ID NO: 799

SEQ ID NO: 803 - protein, 1201 aa, synthetic construct; identical to SEQ ID NO: 800

SEQ ID NO: 804 - protein, 989 aa, synthetic construct
MAEQEALLRLSGVQPRDINKRLTEKFPNRSYWAMKGQRKKDSYQKLVSELVLMAPVPESEIPTQTPTGPQVEDPVPMDRSLWKVEVLACIKDLIEKRGSPEEEPLWDSLTSAFVSLSGGTVDLSDVKVCLDLHAKRLTDLLGPKRKRRRPPRKVPRKRTRRFAKTGDEANNSSAADGAAATAAPSKRTRSQRKPNPARIARSQAYGRVQAAFRKNRKRCADMILEGKWEEEATTLRLEEQEAFWRPLFEEPSMPDDRPVLKIPENWQIVDPISIGEVVKALADSEESAPGSDEITLVSLRSVSPSMLAASYNLWLLAGFCPDRFVIGETILIPKDGDLKNPANYRPITVASRVTRVFHKIIAARLTNSVPLDPRQKAFRPVDGCADNVYLLDSLLKDAQRRRRPLNLAFLDVAKAFDSVSHYTLARCLRRQGVPEPLVEYVCGTLANSSTVLKVQGRKSTPIVCGRGVRQGDPLSAILFNLVIDEVIAGLSKSIGFELSENLVVRCLAFADDLVLVATSADGLRDQMFHVIEGLRNGGMLINPDKCASLRIDVDGRAKRWVVNPSPFLVLQDKQIKALDIVGTYKYLGLQAGAKGLRKAYGSFLQEKLDWLSRAPLKPQQRMYILRCHLLPRMYHGLVLGETNSTALDQYDRMVRRTIRKWLRLPHDTVAAYYHAKVVDGGLEIPRLRYSIPVMKNRRMAKLESSLDPVMQWVANSPCFLGAKVRSSKAAKVVGQTLDTGRDVQRLLANQLHTTADGRGLRHQRQSPHVNNWVRDGSDLLSGGDYLEAVLVRGNLFQTPERATRGRRTVPPMCDAGCNSTCTLAHMSQSCMRTHRLRCERHNSVLEFIVNRAIAMRHDVVREPVIPTRAGRRKPDLVALVDGSVLVVDVTIVSDQWNLNTPFTEKVDYYNTDDIKAWLAASYPGKTCEFGAVVFNWRGALNLKSSALLRRLGVSARDETLLSCRVLTFTANMFKAFTRSTVRKECRSSR

SEQ ID NO: 805 - protein, 997 aa, synthetic construct
MSFVCPDCSRAFGSQRGLTLHRRRAHEEAFHAENLPKQRVKARWDPEELCMLANLEISLDERPPGDRRGINQILIGHHPGRTLESIKCARKSQRYRDLIQELRNQRSAAPAAANTPDPEERPATEASAEVVDPTWAEDLLELLRGTPCDPISLGLPDLVPGNPSQRVRERIDSEYLEWQPPRPTRSQNPPPHPRRDLPTRPRARRRAMYAGVQSDYKRNRGRTAKRILSGEWDSEAPQTPLEELDSFWREIFTTPSMEDSRSPTSAGPTQWGMVAPVTRDELLAALKGMKDGAPGPDGRKLQDLKGIPLTELQCHFNLWLLAGYQPAALRQGVTVFIPKVEGTRDPAQHRPITMSDMVARCFHRILAKRMETFLPFNIRQKAFRAGDGTAESVWFLQQLIQKHKDQLSPLNVAFVDVKKAFDSVSHQSIILAAKRLGAPPPLLSYLTELYSDAWTSIRAGGERSEAIRSGRGVRQGDPMSPHLFNAVIDWVIQDLDPSIGALIGDGRTNVCAFADDLVLIASTPLGLQTLLDSLDRALGLVGLEISAGVNGNSASLRIAIDVKAKRWVVNPHPFLRVTRLPEDAGLIPATSITQAQKYLGVEISAGAIRAKAANKLQRGLSHLSAAPLKPQQRLYILKHHLLPALYHELVLTPCPDKYMNWLDRSIRAALRSWLKMPKDTPTAYFHAEVVDGGLGVEMLSQTVPLMRSKRLSRLGLSDDPVILAMLEYVAARPGMQRHLQAKTYGDSIINTRETLHAALAGQLHRSVDGRGLTPSAVVPDQHGWIQDPPNTTTGRSFVEAVLLRGSLLHTALRASRGHPDASTACDACGRPESLGHILQVCPRSHAARIERHNKVVQLIVRNAKRKGWNCLVEPTIPTRAGVRRPDIVLYKDTGPACVIDAQVVADNADLSVAHHRKCDYYHQPEITDWIHHQTGAGQVIYSSATLSWRGLLSGESAHCLHKTVGLSRNTLALISQATLEMGHRVYRQFKRSTLRTR

SEQ ID NO: 806 - protein, 1204 aa, synthetic construct
MNQNKAAGEIPGHPSGDSNRCPLEQMQWQANRVAGETTLRILHAGGSSGERKDWKCPICERIESSNKLLLRHLSCVHREGGPYTYCCNLCHHYESTNIFSVSAHKRYCKLQSARGMGGSAVAASAGPSAAADAAEQQVEKPFPCNDCSGSFGTQMGLSQHRRIKHPKEYDHERTLRSVGGSVKWTDTELRAMAAEEIRLKAQGERSINQKLCCSSGRTVEAVRLRRQKKDYRNLVTELVGGKVEALVEEQVDNDTHVVDHGVGVREPPPEVPDFREDLLRRIQTDLAKLESTTGLDLALSEFAKACGLYERVRATAAEMDEAWVNWLMATAGCLGVSMTPPTEERDGNGRKRRQNLRRRQKRQDKEKKTRAKEKAKVYAATQNAVRRDPGETYRKIMDGTFSAIVDRSMPSIESVESTYSERFGVPRLDSEEVTPLRDVTEDSCLLGPITCEETRRALASSKPRTGTGPCKWLTLEIAKAIGPQRLAIVYSIWWLFGRIPDTERSCRTVLIYKDKGSREDVDNYRPLTIGNMLVRVYARIWSGRLTEVTSIHRRQKAFVKADGCFENITLLTEAIKHSKRKARPCHIVFLDLAKAFDTVPHPSLIRALTRQGVHPAVRELVADMYTRATTSINMGEKGKCRIDLRSGVKQGCPLSPLLFNLMLDELVTGIDDRDVGIELGCGTKVSIMAFADDLVLLADNATDMESMLNQSAEFFSRRSMKVNVGKCQSLRLERHRVRKGLCLVEEVHRYWKGMAIPSMGLGGVSKYLGVKVTPEGAVNVSQDEVDLWGTRIDKASLKPQQKVDALKCHLVPRLMHQVRLAELGRVKLQQMDRLLRRYFKKYLHMPRWTHTSWIHHRKGGGLPSLVEAAPRARLKASWRVLEGTDEILKPIVRGVAERARSDLLASNLVDEIDLESAAQLKKACEETRRRELSKTVNGGALTTMLNSSASRSWSSGKIYDGRTTVVTGKILSGTLPTRLNQHRGSREVERARLIACRRCGKTAETDIHVLSECEGSHGMICRRHDSVAHKLGKDLRAVGYEVQLERSVKIDQRVLRPDIIAIKAVPMVSPPEGPARTKAFLIDVTVPYERSLELLGERELAKEDKYGVLSASHVGAAIGRTIDEVEAVGIAVGCAGTVAPGTKTKLRNLGLPSTTARSLSITALAKSGQTWMAFERGKTTGSGSAIANSGSLYGSLTAPPSNSP

SEQ ID NO: 807 - protein, 1159 aa, synthetic construct
MLPRSTGASAPPRTLTDRGGPSGGNPTLSLVYPLTDLTCPLCGCVPKGQKVLVSHLGSAHQVTNLTWECGRCHKGWESNRAVAAHYSRCRGRPDAEPARLDTGTTEPDEQVGVDGPSGGGGGEPPPVADASAGGRPHLEVSPGPTRPARHSGPGSPREPDSRGVLCDECGRSFGTLAGKQLHRKRKHVAEYNASLPEQSTRNVFPEEVLRDLAAAALDYPGRGVTGLGVGQFIAERFPRYRVADINALRKRPKYRQIENQLRADRLAAACMPGGEAGGVDNRDARPARAPTVLVRPMGPAESALEDQAWDFYQAVVDGGDIDTLYRGLFDLANGQRPSRGRSQNRHDNGERPPAATNRTQRKRERYRLHQRLFAKRPSDLMNELRKPGTAGQEVLPDTAQVQQVYSERFGSASPRDEAPYRVKPGAAEGPLSPFTIDEVRGVLRSMQLSSAAGPDGVTVKDLVTWGVRVIHPIVNAFLHRGKIPADLRSNRTSLIPKKPDPRDVNDFRPITIGPILNRFYAKLLAERLRSTVTLDPRQKAFVPVDGCSEHLFVVGEVLDLCRKRRKECNMVFLDLAKAFDMVSHHSLLRALARHGVGARFVDIVRDLYTGVSTTIRGRQGPTTPIQMARGVKQGCPMSPILFNLMMDELLESVGDRHELRPARNLPGINALAFADDLVLASGTAHGTEWLLEKARLFFGARSMAVNAEKSHVIRMTLPPRSEAVKVAEGSTFKFGEKPLQNRKVTEVVKYLGLQLSPLGTPKFKETQFLIDLGVVRGSALKPAQKMTLLRRNVLPSYMHSLRLSKVSDQLVRRLDGELRRAAKRILHLPPGTPSDFFYLSPKDGGLGLPNIREAVGLSRLKRITSLRASEDAVVRSYAETSHPLEHECRFWVRALGITDTSFRGLRHAKAALPGQRAARYRETPLGAMFAADKSRAGHPWIKEPRLLSGGDYVLAAHMLSETLPTRVCLARGQTIATKTCRRCRETDETMAHVLNGCSGTRRAQISRHNWVCDTLRQALMKSGSETETVSVLPELRVRVGGEEYRPDLTVIRGPIATVVDVAVAYDSRAENICRRYHDKLRKYDIIRGPLSDQLNERPGATPITEVRVEALVVGSRGLLMPETCQRPLSRLGLSKSLAYTLQEGTVRGSAGVWRCFRAR

SEQ ID NO: 808 - protein, 1339 aa, synthetic construct
MISSTDSHRSVPPQPTEERLRTARGATSGSRTLCSQSGSPAGNYAGSDENFIRDTSASARGTSSLRNQMPVCLLCGIQCKNVAGLKRHAARHARHPNITPLNHLYGAFGFSCQECGADFSSQRGLSQHCRRKHPNSYNQTRLASMPTSKYYWSRDEDHRLLAAASSICQSSANLSELHSRLREHFPSRSKEAIKKRLQKLHWRQQTILDNATPGAVGSPDDLGSGGRSPISPSPLIQETAHSPLINADTEVLDHPDNQHAVSSIPIQQGGSRSMEHLGSGIRSPGSLPVLSSRSQNTPNADHDSFCPRLSDPPGVVSLSIHNQGITQPTPSNRLSALSGVVSPAPICISESPPQYQTTEPTMSTPSSSMTLHAGVATIASDDQSGAATMLQTDISLPAQGDTNEQSGGYINMESPVFPTAMAELLQTPSHLSPSDPVCFQNIPLSFLPLAQPPSIWDDSGAHFSMETPPISCPEVAISPLSPSLNLLLSAREQLTLAPENDKFRELLPEVSKTILESDDLRSLQNSLEDFAQHHFPATWKRRIHRTQSRSSIMNNKTFRRLQYSHVQRLYRNRRSDAAKTILDGRWRNAFLENNDIFPNFTSYWKETLSGDSPTDDRPPRMVLPEITRLIDPITPEEVSSAITGLMGSASGMDHITPIQLRQMPSTSLAAFFNLMLASGYIPRSLNTARLTFVPKTSNPLSPSDFRPISVTSTLTRCFHKILFNRWSPNFPSDRGQFGFLQQDGCFEITSILHAILRNTHAHSKDICIAFADISKAFDRVSHSSILRNASSFGAPTLLIHYLTHFYTSGTTYLDGEPISCRRGVRQGDPLSPLLFIMALDEALQNSTDFLFHTPAGPLPHLAYADDCILLSHSPESLTRRLYQFNKELHSLGLSLNILKTSTLHICANGRAKSVALDTSPIFINSEPLPVISPDSTINILGIPFSWSGKSPTDVSLRCSDMLNELRQAPLKPQQRIDILQHFLMPRLIHCLSLGAVHKNTLRKLDVKIRQNIKAWLRLPKDTATAFFYASVEDNGLGIPNLSTRVPLNRRRRLERHLSSPNPTLAWALRDPTSAPSHYLATSTISVAGNPISDLKFATTAWANALYSSVDSAPLRHVSTTPTSHDWLRNPQRIFPRLYIRAIQLRAGVLSTKSRRARGHRIPAEDIKCRACATPETLSHILQTCPLTHDARCRRHNEIVHMTIRKSSKRHITTMLEPHIPTARSFLKPDLLVVSNTNVFVADVAVCDPPRMERTYQEKSAKYGAISNQTLHAVNRFHPGVRTIIQCPLIFSNRGHIHPTSQKHLLRLGFTRLDISDLCVATIQGSLKTFDTYMRGSGTA

SEQ ID NO: 809 - protein, 1066 aa, synthetic construct
MCRARPSCHLTECSEALPGEAKARLGPAGLTTLSGFCYHVATTNTQNEEAAPVAPESNNRSEGGASDDVSLARCPDCLRQFATKRGLSIHRRSAHPEEYHLENVPKERKKARWDHEEMVLLARREIDLQAAGGRPNVNQVLADVFPSRTLEAIKGVRKRPAYKELLRNLTSSIGTQDGASSLPSEGPSLGSETQQASSEEWTHDWVSDLKKAVVESGIKLDGFRLDDIEPGVPSDWVRDAVDSNYEAWLPSPTEAGRNQRARAPEKEPEGARTKRRAQYAQVQRCYDRDRTRCAQQIIAGNWREPPASLPMSVQEPFWRDLFETPSVPNSQSLPIVGEMHWELTHPITAEDVVRALKKMKDGVPLPDGRKLQDVKAIAADELAGHFNLWLLTGCLPERLRRGQTVLLPKCAEAGDPAKYRPITMSDIVVRCFHRILAQRMEIHLPFSTRQEAFRSGDGVANSVWFIQAVIKHHQDSLRPLNVAFVDVKKAFDSVSHQSILVAAARLGVPPPFLGYIRELYSNAVTTLRIGPDVSGPIRLGKGVRQGDPLSVHLFNAVIDMCLAGLDHSLGIEVSDLRVNHGAFADDIALFAATPRGLQALASELEFQLSMCGLSISSGPHGKSVSMRLDIDGKAKKWVINPLPFLRIANETVPSVSLSQVYRYLGVDVSPRRTKANVAQMLRDGLASISSAPLKPQQRLYIATYHLLPKCHHQLALSPSLAKYLRWLDRTVCSALRSWLKLPKDTPVPFFHAPVVEGGLGVPLHEHVVPLMRAKRLSRLDETPDPVIAAMLKVVSARAGSATMTRQTTLNGRVMTSSCDLKTTLATMLHHTVDGRGLVHSSRVPECHQWVNPVMSSGNQNTAGPYIAAIRVRGNLIGTALRTSRGRPQALSACDCCGRTGSLAHILQVCPRTHASRIARHDKIVDLVESALTRKGYTTCREPAIPTPAEIRKPDLVVARGSAVTVLDATVVADNADLAQSHSRKCEYYDAPAVREWIRDRYGSGEVTFSAVALNWRGSMAIPSACGSLGVSGAFLGLISFVTLERRSWIANHFRRSAYRVRHNDGV

SEQ ID NO: 810 - protein, 1217 aa, synthetic construct
MASSLERTSSSGSVPIQRNEENIQVLLPDATAPAWEEVLTGVKQGTIPTVLIELGLIFINGARVLPRDIPAWLGHEATDIPSEAENEDKTVEEAKSWTEIVLEDDGTVAITVPFNTSVCCKEVFISHPALDKHMSVAHNDTFRRYKCALCTKTFARYKQAAVHHGFCKKKNSREKVVARAEDAQKGTIDNPIEILNPFEDLATEETEEADLVQEQTKVAKKTGLSQHERYRHPNLRNAKRVAGKQNDIERKRLAREKTREQAEETEGTLKPKRTRWSEAETKMLIQLEVELQGSKQINIAIAGILESKTAKQISYKRSMLSKAKQPKGQTPPLDAEPVPIPEPLSVPLVEMLKEAICVDGGENVDMSAELLTRAIEGESVDELQDKLLDIIKTACSKPTKKQNGPVDIPHNPRSDREKKREEYRRIQRLYYKKRKELATEILDCKPAAAKCDLDPKTVHATYQARFGGESQEVNLSRYPKAKPADNELLMKPITQDEIQKAYSRAKKDSAAGPDGIGLRKLKELDPKFAMTCNIYNVWLHTRKVPNQIKDNRSILLPKGTKDLEDVNNWRPLTISSVMLRLYTNILAKRVTKGVPLNPRQRGFIEAPGCSENGFLLQRIQKHAKRNRKRLSVVFLDLAKAFDTVSHKHISEGLKRFRVNSHFIDAVVDLYTDASTHFTLAKGETPKIPMTRGVKQGDPLSPLLFNVAMDPLLEAISAQNNGYKWDESGLQLEALCYADDNGLLTEDPKEMQSNLDVVNEFCEATGMRLNVKKSAGYDIQPSANRSYIINDFQPKWEVDGQKLPLIAPADGTKYLGVKVNSWTGVTAENTGEKLELWCSRIDKAPLKPRQKLVMLNQYAIGRIQFYMSQVETPQCKLLEMDLTVRRYAKKWLKLPDCATNHILYAETKKGGLSLPRLSLSVPCSRINVKRAILNSSDESIRSFAIATDLPEEISREAEHFKIKIPQSAKRGAKWRQLKTNRWRTLPVAGKGQRAFSFKWSNSWLKTNHNYFEEGDFITGLKLRTDTYPTRVTLARAGNTGETTCRRCKSAPETIGHISGQCPAMKGYRIARHDGICEIVSDRLKSKGWTVAREPKLVDDDGNTLVPDIVAIRENRAVIIDPTIVYENSPNSLPQANKVKIQKYLPLNEVIKDEFGVDEVEVHGLAIGARGGWCTQNTKCLTSCDLHDIGLYALLCRYALRGTINMLRMFTDLRGQRRT

SEQ ID NO: 811 - protein, 1086 aa, synthetic construct
MLHIRVRTFPRYKQAAVHHGFCKKKNSREKVVARAEDAQKGTIDNPIEILNPFEDLATEETEEADLVQEQTKVATPTFQCEECDKTFSKKTGLSQHERYRHPNLRNAKRVAGKQNDIERKRLAREKTREQAEETEGTLKPKRTRWSEAETKMLIQLEVELQGSKQINIAIAGILESKTAKQISYKRSMLSKAKQPKGQTPPLDAEPVPIPEPLSVPLVEMLKEAICVDGGENVDMSAELLTRAIEGESVDELQDKLLDIIKTACSKPTKKQNGPVDIPHNPRSDREKKREEYRRIQRLYYKKRKELATEILDCKPAAAKCDLDPKTVHATYQARFGGESQEVNLSRYPKAKPADNELLMKPITQDEIQKAYSRAKKDSAAGPDGIGLRKLKELDPKFAMTCNIYNVWLHTRKVPNQIKDNRSILLPKGTKDLEDVNNWRPLTISSVMLRLYTNTLAKRVTKGVPLNPRQRGFIEAPGCSENGFLLQRIQKHAKRNRKRLSVVFLDLAKAFDTVSHKHISEGLKRFRVNSHFIDAVVDLYTDASTHFTLAKGETPKIPMTRGVKQGDPLSPLLFNVAMDPLLEAISAQNNGYKWDESGLQLEALCYADDNGLLTEDPKEMQSNLDVVNEFCEATGMRLNVKKSAGYDIQPSANRSYIINDFQPKWEVDGQKLPLIAPADGTKYLGVKVNSWTGVTAENTGEKLELWCSRIDKAPLKPRQKLVMLNQYAIGRIQFYMSQVETPQCKLLEMDLTVRRYAKKWLKLPDCATDHILYAETKKGGLSLPRLSLSVPCSRINVKRAILNSSDESIRSFAIATDLPEEISREAEHFKIKIPQSAKRGAKWRQLKTNRWRTLPVAGKGHRAFSFKWSNSWLKTNHNYFEEGDFITGLKLRTDTYPTRVTLARAGNTGETTCRRCKSAPETIGHISGQCPAMKGYRIARHDGICEIVSDRLKSKGWTVAREPKLVDDDGNTLVPDIVAIRENRAVIIDPTIVYENSPNSLPQANKVKIQKYLPINEVIKDEFGVDEVEVHGLAIGARGGWCTQNTKCLTSCDLHDIGLYALLCRYALRGTINMLRMFTDLRGQRRT

SEQ ID NO: 812 - protein, 1252 aa, synthetic construct
MNRVTSQVAISIANMASFPLGTSFPLGTSSTGLVPIRCNEGNNKVLLPAANTPAQEDVCEGEQIRIRPTILIEKGGLMFINGARTLAENIPIWLGHDATDCEMDDTRTWTELVIESDSTVAITVPYTTSTCCKEVFISHSELDKHLSVAHSDAFRRYVCALCMRSRARYRQIAVHYAFCLRSNRKEAVASTPSTLDGPEASLCDTNPYISLAAESSPEDTEEGDLSQRAIPVTKPTFECKECDRSFPTKIGLSQHERYKHPNLRNANRIADQEKDIERKRKARSDSKKLTEETGTTSKPKKSLWTEVEIELLVQLEVELSGARFINMAIAERMPGKTNKQISDKRKSLKSQVTSKARTKKVQNPTPTLVQDTTVVQSEPTIPREDMFNNAICNSGLECVGMSAELLTQAIEGKDIDGLQDKLITIIKSACSKPIKAKPNGPANSTENPSGKKKNKQEEYRRVQNLYSRRRKQLATEILDCKVGSTKCDIDPQIVQETYEGRFGGESQEVNLSKYPNAKPADNNVLIEPITQQEIQKAYSRAKKDSASGPDGIGLKKLKELDPQFAMTSNLYNVWLYTGKVPMEIKENRSILLPKGTTGLENVDNWRPLTISSVMLRLYTNILAKRVIKGVPLNPRQRGFIEAPGCSENGFLLQRIQKHAKRNRKRLSVVFLDLAKAFDTVSHKHIQQGLKRFCVNDHFIETVVDLYTDASTHFTLAKGETSKIPMTRGVKQGDPLSPLLFNIAMDPLLEAISAQNNGYKWDESGLQLEALCYADDNGLLTEDPKDMQENLEVVNEFCRATGMKLNVKKSAGYDIKPSANRSYVINDFHPKWVVDGQKLPLIAPADSTKYLGVKVNSWNGVTKEDLGEKLELWCSRINKASLKPRQKLVMLNQYAIGRLQFYLSQVETSQGKLLEMDLTVRRYAKQWLKLPECATDHILYAGTDKGGLSLPRLSLSVPCSRINVKRAVLNSSDESIRAFAVETGLPEEIDTDADHFRIKVPANPKRGAKWRQLEANRWRKLKVAGKGHRAFGHKCSNSWMRNENNYFNEGDFITGLKLRTDTYPTKVTLARAGNTGGDVACRRCKAAPETVGHISGQCPAVKGYRINRHNGICGILSDRLKEKGWTVALEPRIKAADGKTLIPDIIAVKDRQAVVIDPTIIYENSDHSLQSANKAKIQKYSPLTNEIKTLYGADKVEFHGLAIGARGGWCSQNTKCLTSVGLHDTGFHAMLCRYALRGTINLLRTFTDLHGPK

SEQ ID NO: 813 - protein, 1252 aa, synthetic construct
MNRVTSQVAISIANMASFPLGTSFPLGTSSTGLVPIRCNEGNNKVLLPAANTPAQEDVCEGEQIRIRPTILIEKGGLMFINGARTLAENIPIWLGHDATDCEMDDTRTWTELVIESDSTVAITVPYTTSTCCKEVFISHSELDKHLSVAHSDAFRRYVCALCMRSRARYRQIAVHYAFCLRSNRKEAVASTPSTLDGPEASLCDTNPYISLAAESSPEDTEEGDLSQRAIPVTKPTFECKECDRSFPTKIGLSQHERYKHPNLRNANRIADQEKDIERKRKARSDSKKLTEETGTTSKPKKSLWTEVEIELLVQLEVELSGARFINMAIAERMPGKTNKQISDKRKSLKSQVTSKARTKKVQNPTPTLVQDTTVVQSEPTIPREDMFNNAICNSGLECVGMSAELLTQAIEGKDIDGLQDKLITIIKSACSKPIKAKPNGPANSTENPSGKKKNKQEEYRRVQNLYSRRRKQLATEILDCKVGSTKCDIDPQIVQETYEGRFGGESQEVNLSKYPNAKPADNNVLIEPITQQEIQKAYSRAKKDSASGPDGIGLKKLKELDPQFAMTSNLYNVWLYTGKVPMEIKENRSILLPKGTTGLENVDNWRPLTISSVMLRLYTNILAKRVIKGVPLNPRQRGFIEAPGCSENGFLLQRIQKHAKRNRKRLSVVFLDLAKAFDTVSHKHIQQGLKRFCVNDHFIEAVVDLYTDASTHFTLAKGETSKIPMTRGVKQGDPLSPLLFNIAMDPLLEAISAQNNGYKWDESGLQLEALCYADDNGLLTEDPKDMQENLEVVNEFCRATGMKLNVKKSAGYDIKPSANRSYVINDFHPKWVVDGQKLPLIAPADSTKYLGVKVNSWNGVTKEDLGEKLELWCSRINKASLKPRQKLVMLNQYAIGRLQFYLSQVETSQGKLLEMDLTVRRYAKQWLKLPECATDHILYAGTDKGGLSLPRLSLSVPCSRINVKRAVLNSSDESIRAFAVETGLPEEIDTDADHFRIKVPANPKRGAKWRQLEANRWRKLKVAGKGHRAFGHKCSNSWMRNENNYFNEGDFITGLKLRTDTYPTKVTLARAGNTGGDVACRRCKAAPETVGHISGQCPAVKGYRINRHNGICGILSDRLKEKGWTVALEPRIKAADGKTLIPDIIAVKDRQAVVIDPTIIYENSDHSLQSANKAKIQKYSPLTNEIKTLYGADKVEFHGLAIGARGGWCSQNTKCLTSVGLHDTGFHAMLCRYALRGTINLLRTFTDLHGPK

SEQ ID NO: 814 - protein, 1252 aa, synthetic construct
MNRVTSQVAISIANMASLPLGTSFPLGTSSTGLVPIRCNEGNNKVLLPAANTPAQEDVCEGEQIRIRPTILIEKRGLMFINGARTLAENIPIWLGHDATDCEMDDTRTWTELVIESDSTVAITVPYTTSTCCKEVFISHSELDKHLSVAHSDAFRRYVCALCMRSRARYRQIAVHYAFCLRSNRKEAVASTPSTLDGPEASLCDTNPYISLSAESSPEDTEEGDLSQRAIPVTKPTFECKECDRSFPTKIGLSQHERYKHPNLRNANRIADQEKDIERKRKARSDSKKLTEETGTTSKPKKSLWTEVEIELLVQLEVELSGARFINMAIAERMPGKTNKQISDKRKSLKSQVTSKARTKKVQNPTPTLVQDTTVVQSEPTIPREDMFNNAICNSGLECVGMSAELLTQAIEGKDIDGLQDKLITIIKSACSKPIKAKPNGPANSTENPSGKKKNKQEEYRRVQNLYSRRRKQLATEILDCKVGSTKCDIDPQIVQETYEGRFGGESQEVNLSKYPNAKPADNNVLIEPITQQEIQKAYSRAKKDSASGPDGIGLKKLKELDPQFAMTSNLYNVWLYTGKVPMEIKENRSILLPKGTTGLENVDNWRPLTISSVMLRLYTNILAKRVIKGVPLNPRQRGFIEAPGCSENGFLLQRIQKHAKRNRKRLSVVFLDLAKAFDTVSHKHIQQGLKRFCVNDHFIETVVDLYTDASTHFTLAKGETSKIPMTRGVKQRDPLSPLLFNIAMDPLLEAISAQNNGYKWDESGLQLEALCYADDNGLLTEDPKDMQENLEVVNEFCRATGMKLNVKKSAGYDIKPSANRSYVINDFHPKWVVDGQKLPLIAPADSTKYLGVKVNSWNGVTKEDLGEKLELWCSRINKASLKPRQKLVMLNQYAIGRLQFYLSQVETSQGKLLEMDLTVRRYAKQWLKLPECATDHILYAGTDKGGLSLPRLSLSVPCSRINVKRAVLNSSDESIRAFAVETGLPEEIDTDADHFRIKVPANPKRGAKWRQLEANRWRKLKVAGKGHRAFGHKCSNSWMRNENNYFNEGDFITGLKLRTDTYPTKVTLARAGNTGGDVACRRCKAAPETVGHISGQCPAVKGYRINRHNGICGILSDRLKEKGWTVALEPRIKAADGKTLIPDIIAVKDRQAVVIDPTIIYENSDHSLQSANKAKIQKYSPLTNEIKTLYGADKVEFHGLAIGARGGWCSQNTKCLTSVGLHDTGFHAMLCRYALRGTINLLRTFTDLHGPK

SEQ ID NO: 815 - protein, 998 aa, synthetic construct
MAHLAIGIWTNCGPTVRSKQPRKNRRDRVPDGPDQDGPLPGEGELENDQARTVEEIRNPNLTPDHDTEGADENVNIGEGSSNDNTRSATCPICGKSFSGFPGRRLHERKAHATEFHAQESEILHKKINKRWTDTEMYLLAQRDASLQHAGMSNIDRIVELSNEFERSIDTLRKRRTLPEYKVLLDAALEKLTERVELHITPPVQIEPPMEGSNVNKPVQKRVATLWTIEEEMMLANKEAILTIDGKIGSEITEILSNGSSRSKESIRKRRSTQGFKQLVKAKIQELTQPIHLEVITEGPELRQELTQVIHLEVIHEEPELEVQDTPTPPPRLEEEDEAELNRQDMFKHWFTVAGESQMRNLWDPTQRMGINEAHEEIDKYTEEFMQAERLIKAERPTNVDRRKSTPPQGGRKSRRNNLMQLTQKKFEKDPSGCIRAILNDTLVNEGGVDQVLLREYWTEVFNKTPACEVFESKMKHPVLYKLSEPITKNEVEIGLKSLKTKSAAGVDGITCADLKKAKVGKIVTLFRVFQVSSYTPARLCLGSVSMVPKIPEPTLPQHYRPITVASMILRLYHGIIARRFDMLPISPRQKAYKKLDGIEENIWIVSKLLELAKKNKKGIALIFLDISKAFDSVGHPIIQQAAERLGVPKDIRNYLDVLYSTSELVFKGCSQKFKQNKGVRQGDQLSGPLFNGTADLGNEDLDLNVQFMIDEDVGIAEGLFADDEFLAAEGSLALQYQVDRVIPRYKKCGLQMNTSKCKTIFIEYNAQTKKYMVNPNPIIKINGEEVPAVSLEEAYKYLGVKLGAGTPKHKDILETLKIKLTRIDKSCLRPQQRLMALRRHIVPSLYHVMIFSKATKASLLTLDRSIRHFVKKWCHTPKDTLNSMIHSDIKDGGLGIPSLSLRIPRMAMQRHIRLSASIDPVIQAILKSEAGQASVARIHKTRRVNGIDVETKQAEREVWMEEMYSRVDGKGMKQHRDSETINEWVSDCSYKISGADFI

SEQ ID NO: 816 - protein, 1172 aa, synthetic construct
MPEVPENDIARTEGEIRNPNHASDYDVEGANVNGNIGEGNSIDNTRSVTCPVCGRSFASYSGRRVHEKHAHPTDYANEELVLHKNKSKRLWTENELYLLAQRDAALENMGMMNGDRIVILVNEFERSADSLKKRRNLPEYKALVKAALEKLRNLPVQEEVRVESHTTPIVPTVLNVSTDTVNTVVHNPVQKRVALLWTIEEETLLAHKEAALIMEGVEGTEITKILSEGSTRSHESIRKRRCLAAYKALVQAKLRELTQEPPSELEIDSEISSESQGVIIEETQETHLVESQETQTPRVELSDDDQAELNRQEMFKHWFTVAGQTQLKNLWDPTKRMGISEEPIEIDKFTEEFIQSNGLLKTEKPKDVERKKSAPPQGGRNARRSALRSLTQRKFEKDPSGCIRAILNNTLVTEGGVDIKVLKEYWIDVFNKKPDCEIFESKMKHPTLYRLSEPITSKEVEEGLKALKTKSAAGVDGVTCADLRKVKVSMIVLLFRIYQACSYTPAFIRLGSVTMVPKIPEPTLPQHYRPITVASMILRLFHGIIARRFDMLPISPRQKAYKKLDGIAENIWIVSELIELAKKNKKGIALIFLDVSKAFDSVGHPIIQQAAERLGVPKDIRKYLDVLYSSSELVFKGCSQRFKQNGGVRQGDQLSGPLFNGTADLGNEDLDPNLMYMICEEVGIAEGLFADDEFLAAERSMALQYQVDRLIPRYKKCGLQMNADKCKSLVIVYNAQRKKYLVDPTPVITINGALVPSISLDETYKYLGVKLGAGTPCHKNILESLRVKIERVDKSCLKPQQRMLALRRHIIPSLYHVLIFSKASKKSLLTLDRNIRSFVKKWCHLPKDTLNSFIHAEIRDGGLGIPNLSLRIPRMTMQRHMRLSASLDPVVQAIYTSIAGQASIARIHKPRRMNNMDIDTKKTEQEVWADELYSRVDGKGLRQHRDSKMINEWVTDCSLKISGADFVRAIQVRSNTLKTPARAARGRTENGNNLCRLDRQVANSNHIFQVCQATHGLRVKRHDEVVDMLKSSMIKRDYVTFKEPKLQYKKTFRKPDLIISKSGKVTILDPIICGDTADLNERRLQKEVLYGEEVLLEEARRIVRAHDPGIQIKETIVLGVPISFRGSLDNFTIRFLKRLGVPRRFLNLIIVRTLVNTYKMFQAYQRMTTAAR

SEQ ID NO: 817 - protein, 1203 aa, synthetic construct
MAHLAIGIWTNCGPTVRSKQPRKNRRDRVPDGPDQDGPLPGEGELENDQARTVEEIRNPNLTPDHDTEGADENVNIGEGSSNDNTRSATCPICGKSFSGFPGRRLHERKAHATEFHAQESEILHKKINKRWTDTEMYLLAQRDASLQHAGMSNIDRIVELSNEFERSIDTLRKRRTLPEYKVLLDAALEKLTERVELHITPPVQIEPPMEGSNVNKPVQKRVATLWTIEEEMMLANKEAILTIDGKIGSEITEILSNGSSRSKESIRKRRSTQGFKQLVKAKIQELTQPIHLEVITEGPELRQELTQVIHLEVIHEEPELEVQDTPTPPPRLEEEDEAELNRQDMFKHWFTVAGESQMRNLWDPTQRMGINEAHEEIDKYTEEFMQAERLIKAERPTNVDRRKSTPPQGGRNSRRNNLMQLTQKKFEKDPSGCIRAILNDTLVNEGGVDQVLLREYWTEVFNKTPACEVFESKMKHPVLYKLSEPITKNEVEIGLKSLKTKSAAGVDGITCADLKKAKVGKIVTLFRVFQATSYTPARLRLGSVSMVPKVPEPTLPQHYRPITVASMLLRLYHGIIARRFEMLPISPRQKAYKKLDGIAENIWIVSELLELAKKNKKGIALIFLDVSKAFDSVGHPIIQQAAERLGVPKDIRKYLDVLYSTSELVFKGCSQKFKQNGGIRQGCQMSGPLFNGTADLGNEDLDPEVQFMIDEDVGIGEGLFADDEFLAAEGKLALQHQVDRVIPRYKKCGLGMNTSKCKTILIEYNAQTKRYMVNPKPFIKINGEEVPAVSFEETYKYLGVKLGAGTPRHKDILETLKLKLSRIDKSCLRPQQRLMALRRHIVPSLYHVLIFSKATKGSLLTLDRSVRHFVRKWCHIPKDTLNSMIHSDIKDGGLGIPALSLRIPRMAMQRHMRLSASIDPVIQAILKSEAGRASVARIHKTRKVNGIEVDTKQAEREVWTEEMYSRLDGKGMKQHRDSNTINDWVSDCSLKISGADFVRAIQIRLNTLKTPARAARGRRENGNNLCKLDRQVANSNHIFQVCQATHGLRIKRHDEVVDMLKSSMNRKQYSTYKEPRLKYKNTFRKPDLIITKKGKVVILDPIICSDTADLNERRLQKEILYGEEVVLEEARSFVKSHNPGLQIKEIIVHGVPMTFRGSLDNFTVRFLKRLGVPRRYLNLIIVRTLVNTNKMYQAYTRMTTAAR

SEQ ID NO: 818 - protein, 1035 aa, synthetic construct
MFACSECDGSFGNKGALGNHCKWKHAQTRLPERRAGGEFACPDCDNAYDSLGGLNVHRRAKHPDVYHAARQPAARVRARWSYEEMVLVARAELEIRGTNPPRGVVRVLHSRFPDRTFEAIKCLRNKNPRYKEVIAALEAEGVDEEPPTVTPSEQPHASAQADGLWRDQLQMAIDIGHVGVDDLDWVADGCSAEDIRNKLDELFASWVGHLVRGERAPARSHQPAPGVRDPGRELDPRRRRRAQYSAIQHLYGRKPSAAAHKVLDGSWECDDPVPTPTLEEFRMAWQPIFETPSIKDNRRPTCVGQVRWEIVSPVTPDELNKVLTEGASSAPGPDGVKLKDVIGLGTGELCSHFNLWLLCGSQPSALCVGRTIYIPKGSESNDALKYRPITIASHILRVFHKIMARRFDAFLPLKYTQKGFRSGDGIAQHVLSLQAMIDGAKRRCKPVNLVFLDVRKAFDSVSHDTIVLAMPRLGCPDPFLSYIRDLYSRSSTVIEHNGGRSAPIFTRRGVKQGDPLSPFMFNAVIDWAFSSLDDHIGFSFGHVRVNNLGYADDVALLSDTQAGLRSQLGQFESHLAMGGLTISAGTEGKSASLSIAVDGKAKRWVVDQTPFLATNADIIPALSASGEYRYLGTMLGSGGAKVRSSLRKDLLQGLRNISRAPLKPHQRLRILRIFLLPKYLHELVLAPVADGWLNWLDIAIRANVRQWLKLPQDTPVAFIHAGTGDGGLSVPSLRYSVPVMRRKRLEAVHSATDPISTALAASPFFQKELSGLSCKTLGGRLVTDKHSLAQAWAACLHTKVDGRGLSEARFCTEGSGWVSNPPRNQSGANYIGAIKARGGLLCSKVRSARGDSGRDVRCDSCMRPETAQHIIQVCPRTSGPRMRRHDRVVQFVSAAAERAGYKVLVGPRIVGRTLGVRKPDLVLWNERKAYVADVTVTSDQVGGVKAHRDKVAYYDQPEIREWVEKYTGRSDISFSAVAANWRGVLSPLSADFLKSVLKLSNWDVSLLGLRICEETYHIHRYFGKGTYRIRGRGAS

SEQ ID NO: 819 - protein, 1035 aa, synthetic construct
MFACSECDGSFGNKGALGNHCKWKHAQTRLPERRAGGEFACPDCDNAYDSLGGLNVHRRAKHPDVYHAARQPAARVRARWSYEEMVLVARAELEIRGTNPPRGVVRVLHSRFPDRTFEAIKCLRNKNPRYKEVIAALEAEGVDEEPPTVTPSEQPHASAQADGLWRDQLQMAIDIGHVGVDDLDWVADGCSAEDIRNKLDELFASWVGHLVRGERAPARSHQPAPGVRDPGRELDPRRRRRAQYSAIQHLYGRKPSAAAHKVLDGSWECDDPVPTPTLEEFRMAWQPIFETPSIKDNRRPTCVGQVRWEIVSPVTPDELNKVLTEGASSAPGPDGVKLKDVIGLGTGELCSHFNLWLLCGSQPSALCVGRTIYIPKGSESNDALKYRPITIASHILRVFHKIMARRFDAFLPVKYTQKGFRSGDGIAQHVLSLQAIIDGAKRRCKPVNLVFLDVRKAFDSVSHDTIVLAMRRLGCPDPFLSYIRDLYSRSSTVIEHNGGRSAPIFTRRGVKQGDPLSPFMFNAVIDWAFSSLDDHIGFSFGHVRVNNLGYADDVALLSDTQAGLRSQLGQFESHLAMGGLTISAGTEGKSASLSIAVDGKAKRWVVDQTPFLATNADIIPALSASGEYRYLGIMLGSGGAKVRSSLRKDLLQGLRNISRAPLKPHQRLRILRIFLLPKYLHELVLAPVADGWLNWLDIAIRANVRQWLKLPQDTPVAFIHAGTGDGGLSVPSLRYSVPVMRRKRLEAVHSATDPISTALAASPFFQKELSGLSCKTLGGRLVTDKHSLAQAWAACLHTKVDGRGLSEARFCTEGSGWVSNPPRNQSGANYIGAIKARGGLLCSKVRSARGDSGRDVRCDSCMRPETAQHIIQVCPRTSGPRMRRHDRVVQFVSAAAERAGYKVLVEPRIVGRTLGVRKPDLVLWNERKAYVADVTVTSDQVGGVKAHRDKVAYYDQPEIREWVEKYTGRSDIFFSAVAANWRGVLSPLSADFLKSVLKLSNWDVSLLGLRICEETYHIHRYFGKGTYRIRGRGAS

SEQ ID NO: 820 - protein, 1035 aa, synthetic construct
MFACSECDGSFGNKGALGNHCKWKHAQTRLPERRAGGEFACPNCDNAYDSLGGLNVHRRAKHPDVYHAARQPAARVRARWSYEEMVLVARAELEIRGTNPPRGVVRVLHSRFPDRTFEAIKCLRNKNPRYKEVIAALEAEGVDEEPPTVTPSEQPHASAQADGLWRDQLQMAIDIGHVGVDDLDWVADGCSAEDIRNKLDELFASWVGHLVRGERAPARSHQPAPGVRDPGRELDPRRRRRAQYSAIQHLYGRKPSAAAHKVLDGSWECDDPVPTPTLEEFRMAWQPIFETPSIKDNRRPTCVGQVRWEIVSPVTPDELNKVLTEGASSAPGPDGVKLKDVIGLGTGELCSHFNLWLLCGSQPSALCVGRTIYIPKGSESNDALKYRPITIASHILRVFHKIMARRFDAFLPLKYTQKGFRSGDGIAQHVLSLQAMIDGAKRRCKPVNLVFLDVRKAFDSVSHDTIVLAMRRLGCPDPFLSYIRDLYSRSSTVIEHNGGRSAPIFTRRGVKQGDPLSPFMFNAVIDWAFSSLDDHIGFSFGHVRVNNLGYADDVALLSDTQAGLRSQLGQFESHLAMGGLTISAGTEGKSASLSIAVDGKAKRWVVDQTPFLATNADIIPALSASGEYRYLGIMLGSGGAKVRSSLRKDLLQGLRNISRAPLKPHQRLRILRNFLLPKYLHELVLAPVADGWLNWLDIAIRANVRQWLKLPQDTPVAFIHAGTGDGGLSVPSLRYSVPVMRRKRLEAVHSATDPISTALAASPFLQKELSGLSRKTLGGRLVTDKHSLAQAWAACLHTKVDGRGLSEARFCTEGSGWVSNPPRNQSGANYIGAIKARGGLLCSKVRSARGDSGRDVRCDSCMRPETAQHIIQVCPRTSGPRMRRHDRVVQFVSAAAERAGYKVLVEPRIVGRTLGVRKPDLVLWNERKAYVADVTVTSDQVGGVKAHRDKVAYYDQPEIREWVEKYTGRSDISFSAVAANWRGVLSPLSADFLKSVLKLSNWDVSLLGLRICEETYHIHRYFGKGTYRIRGRGAS

SEQ ID NO: 821 - protein, 1035 aa, synthetic construct
MFACSECDGSFGNKGALGNHCKWKHAQTRLPERRAGGEFVCPDCDNAYDSLGGLNVHRRAKHPDVYHAARQPAARVRARWSYEEMVLVARAELEIRGTNPPRGVVRVLHSRFPDRTFEAIKCLRNKNPRYKEVIAALEAEGVDEEPPTVTPSEQPHASAQADGLWRDQLQMAIDIGHVGVDDLDWVADGCSAEDIRNKLDELFASWVGHLVRGERAPARSHQPAPGVRDPGRELDPRRRRRAQYSAIQHLYGRKPSAAAHKVLDGSWECDDPVPTPTLEEFRMAWQPIFETPSIKDNRRPTCVGQVRWEIVSPVTPDELNKVLTEGASSAPGPDGVKLKDVIGLGTGELCSHFNLWLLCGSQPSALCVGRTIYIPKGSESNDALKYRPITIASHILRVFHKIMARRFDAFLPLKYTQKGFRSGDGIAQHVLSLQAMIDGAKRRCKPVNLVFLDVRKAFDSVSHDTIVLAMRRLGCPDPFLSYNRDLYSRSSTVIEHNGGRSAPIFTRRGVKQGDPLSPFMFNAVIDWAFSSLDDHIGFSFGHVRVNNLGYADDVALLSDTQAGLRSQLGQFESHLAMGGLTISAGTEGKSASLSIAVDGKAKRWVVDQTPFLATNADIIPALSASGEYRYLGIMLGSGGAKVRSSLRKDLLQGLRNISRAPLKPHQRLRILRNFLLPKYLHELVLAPVADGWLNWLDIAIRANVRQWLKLPQDTPVAFIHAGTGDGGLSVPSLRYSVPVMRRKRLEAVHSATDPISTALAASPFFQKELSGLSCKTLGGRLVTDKHSLAQAWAACLHTKVDGRGLSEARFCTEGSGWVSNPPRNQSGANYIGAIKARGGLLCSKVRSARGDSGRDVRCDSCMRPETAQHIIQVCPRTSGPRMRRHDRVVQFVSAAAERAGYKVLVEPRIVGRTLGVRKPDLVLWNERKAYVADVTVTSDQVGGVKAHRDKVAYYDQPEIREWVEKYTGRSDISFSAVAANWRGVLSPLSADFLKSVLKLSNWDVSLLGLRICEETYHIHRYFGKGTYRIRGRGAS

SEQ ID NO: 822 - protein, 1035 aa, synthetic construct
MFACGQCERTFGNKGALGNHCKWKHAQTRLPERTNGGEFPCPDCDNAYGSSGGLNVHRRARHPDVYHAARQPAARVKARWSYEELVLVARAELEIRGTNPPQGVVRVLHSRFPDRTFEAIKCLRNKNPRYKEVLAALEVEEVDEGLPTVTPSEQTHAFAQADGLWRDQLRMAINIEHLGVDDLDWVADGCPAEDIRKKLDELFASWVGHLVRGERAPARSHQPAAGVTNPSRELDPRRRRRAQYSAIQHLYGRKPSAAAHKVLDGSWECGDPVPTPTLEDFRMAWQPIFETPSIKDNRRPTCVGQVRWEIVSPVTPGELEKVLTEGASSAPGPDGVKLKDVIGLGIGELCSHFNLWLLCGSQPSAMCVGRTIYIPKGSESNDALKYRPITIASHILRVFHKIMARRFDAFLPLKYTQKGFRSGDGIAQHVLSLQAIIDGAKRQRKPVNLVFLDVRKAFDSVSHDTIVLAMRRLGCPDPFLSYIRDLYSRSSTVIEHNGERSAPIFTRRGVKQGDPLSPFMFNAVIDWAFSSLDDHVGFSFGHVRVNNLGYADDVALLSDTRAGLRSQLGKFESHLAKGGLTISAGTEGKSSSLSIVVDGKAKRWVVDQTPFLATNEGIIPSLSASGEYRYLGIMLGSGGAKVRSSLREELLQGLQNITRAPLKPYQRMRILRNFLLPKYLHELVLAPVADGWLNWLDTAIRANVRQWLKLPQDTPVAFIHAGTGDGGLSVPSLRYSVPVMRRKRLEAVHSATDPLSTALTASPFFQKELSGLSRKTLGGRLVTDKQSLAQAWAGCLYTKVDGRGLSEARSCAEGSRWVSNPPRNQSGANYIGAIKARGGLLYSKVRSARGDSGRDVRCDSCMRPETAQHIIQVCPRTSGPRMRRHDRVVQFVSAAAERAGYKVLVEPRIVGRTLGVRKPDLVLWNESRAYVADVTITSDQVGGVKAHRDKVAYYDQPEIREWVERFTGLSHISFSAVAANWRGVLSPLSADFLKSVLKLSNWDISLLGLRICEETYHIHRYFGRSTYRVRGRGPS

SEQ ID NO: 823 - protein, 1105 aa, synthetic construct
MKCLRYISGLYWKISLLVANMFARLRPGRTSVSDTQNNLNTIGASNEAPTDTFPIGENDNTSSIFVCQYCQKVFQTNRGLANHQRSKHEEIYHASNVPKARKKARWDDEELVLLAREEIRLTDLRVRNINAELIKVLPHRTLESVKGVRRKTNKRYHDLLGKLRSDPSSVVDPNGRAESVRGGAPPEGVFDPGRSWRADDQSLHLDHDSWIAKVRNEIDEFEFLTGLDVGLIKPDCLTEEDKEGVNLDFDRWVESMTVRNRTEVVPPGPKRRGRVGVRREGESTTTTSVGIVPPNARSSKRRKRKHPNSSWGRKAAYKRTQDLFRKNKSRCAQDILSGSWERPRRGLPLEDQEPYWREILEQESVEDLRTPEQVGPVLWSMIDPISSAELEAIMKAMKPGAPGPDGMVLSQLKQLNGEEVRARFNLWLLAGYCPTSCCMGETVLLPKDQNDIRPPKHRPITMANLIVRCYHKLMARRMGELMPISDRQKAFRAGDGLGENVLLLRAIIKHHTRECLPLNVVFLDISKAFDSVSHQSILIAAKRMGVPPPLLSYLHEYYSRSQTRLRVGGRKSEPISVRRGVKQGDPMSVHLFNAVIDWALSTLDPDLGIKLNGVNLNHLAFADDIGLLTKTSVGAQSQIDRLNDHLNKCGLFISAGSTGKSASLKIDVDGRRKLWVVNPNVHLHVADEDIPAKSIGETYEYLGVPLSAKGAIPQSAHKLQKYLDNLTRAPLKPQQRLYILKRHVIPALYHQLVLSDCSKGLLNFLDVKIRGAVKRWLKMPKDTNDFFIHAPVIEGGLGVAVLKNAIPLMRKSRLEKLLGSNDPAVAAVAGTSFVADMLRSDSVPLQVAGIPICNKENLKRALAYGLHRSVDGSGLNKCSQISIANKWVDSPTHLMSGANYIGAIKVRGNLMATAARMARGRPQRDVACDACGRTESLGHILQVCPRTSGARIDRHNSVLARTVKVLVRNHWSVLVEPAIPTPAGIRRPDIIAWKGGSTCYVIDVTVVSDNADLDRVHQLKIEHYNTQHVRDWALRVSGTASVTFSSISFNWRGALAGPSYDLLKNSLALGEYDIVLLATIVMEKGYQTWLDFKRSTFRERSWNNG

SEQ ID NO: 824 - protein, 1112 aa, synthetic construct
MARAHREVTDQATKEDHNSRRLVRWTPAELLDLAEKEALLMKKGVKFMNEALFPLCPGRSLEAIKGQRRKEAYKELVKAELAKLVTEGLCIAGDEGEGASVEGEEGRGEGQGPSRSGPASGTLDTTQRRLNQRIEPERQNDRQNPLLGTEGRATGLAHLRRDALREGQRQIDMTDSQPEGEEHLTPNVAELLQGAEGEVEDGESSCIWTQDVATQEELDEFIRKSTMTIAQRKKAKYEHCRILKGQMELYKDIIGNVWDHEEETGVGADRKVIDDWVREQLLKWVRWEGNPKPKPVRQPDKKQPFISKKKEKARLRQLTQSFYERSPSRCINAVLSGNLEVTQVIPKKELEEYWASIFSRKPEGIVKVDTINRPADTSYSSPISLDEVKEGLRNLKDNSPGPDGLKKSDVAKIPVQVLHAMLLIFQGSSYTPKFLRLGNVTLVPKNAKPENPGQYRPITVTSQLLRLYHGILAKRLVRLPLSKRQKAFLPRDGIAENAFIIEHLIKGARARREDLFLVFMDVAKAFDSLAHTSLLQAAERIGIPASLREYIALVYEEAEIQFKGGEKKIKQTMGIRQGCQKSAPLFDASLDMCYEKLDPRIGYRVPDPAAPQELCSITQKMRPGGYDITEALFADDGVTVAATRIGSVKNTLLAVRELGKCGMKMNPKKCATLAIRANGRLKKSYVDPTPYLTIDGEVVPALKLGETYKYLGLKIGANGYDIREITKKLIVQLDRLSEASFKPQQRLHALKVNVIGGMLHTLVLVHVSLKTLLNIDRTIRRYVRKWLHLQSDTPTAMFHANTADGGLGIPSMVTRIPRLRRARLVKMTQSDDPLIKIMVSSGTGEAAVRLASGIKRLGEVQITNKQSERRAWREELISKTDGRGLQYHDGFGDGWILDPLFPAKGGEFIKALRVRCNDMKTPARAVRGDRGDPTCRLDKQTANATHISQICQVTHGLRVKRHDGIVKMVRAGLQRVGFTVQLEPKIAIEGTFFKPDIVPWKKDKGFVIDPIICGDNCDIEERYRQKVTAYDKDAVKRYVKEEALRVSGATVKAVEVHGFAINFRGGWSTSTQKLLSRLGLGASLKHFISIRTLTTTWTIIQTYGRVSLGHRK

SEQ ID NO: 825 - protein, 1112 aa, synthetic construct
MARAHREVTDQATKEDHNSRRLVRWTPAELLDLAEKEALLMKKGVKFMNEALFPLCPGRSLEAIKGQRRKEAHKELVKAELAKLVTEGLRTAGDEGEGASVEGEEGRGEGQGPSRSGPASGTLDTTQGHLNQRMEPERQNDRQNPRLGTEGRATGLAHLRRDALREGQRQIDMTDSQPEGEEHLTPNVAELLQGAEREVEDGESSCIWTQDVATQEELNEFIRKSTLTTAQSKNAKYEHCRILKGQMELYKDIIGNVWDHEEETGVGADRKVIDDWVREQLLKWVRWEGNPKPKPVRQPDKKQPFISKKKEKARLRQLTQSFYERSPSRCINAVLSGNLEVTQAIPKKELEEYWASIFSRKPEGVVKVDTINRPADTSYSSPISLDEIKEGLRNLKDNSPGPDGLKKSDVAKIPVQVLHAMLLIFQGSSYTPKFLRLGNVTLVPKNAKPENPGQYRPITVTSQLLRLYHGILAKRLVRLPLSKRQKAFLPRDGIAENAFIIEHLIKGARARREDLFLVFMDVAKAFDSLAHTSLLQAAERIGIPSSLREYIALVYEEAEIQFKGGEKKIKQTMGIRQGCQKSAPLFDASLDMCYEKLDPRIGYRVPDPAAPQELCSITQKMRPGGYDITEALFADDGVTVAATRIGSVKNTLLAVRELGKCGMKMNPKKCATLAIRANGRLKKSYVDPTPYLTIDGEVVPALKLGETYKYLGLKIGANGYDIREITKKLIVQLDRLSEASFKPQQRLHALKVNVIGGMLHTLVLVHVSLKTLLNIDRTIRRYVRKWLHLQSDTPTAMFHANTADGGLGIPSMVTRIPRLRRARLVKMTTSDDPLIKIMVSSGTGEAAVRLASGIKRLGGVQIINKQSERRAWREELISKTDGRGLQYHDGFGDGWILDPMFPAKGGEFIKALRVRCNAMKTPARAARGDRGDPTCRLDKQTANATHISQICQVTHGLRVRRHDGIVKMVRAGLQRIGYTVQLEPKIAIEGTFVKPDIVAWRKDKGFVIDPIICGDNCDPEERYRQKVTTYDKEAVRKYVKEEALRVSGANVKEVEVHGFAINFRGGWSTSTQKLLSRLGLGTSLKHFISIRTLTTTWTIIQTYDRVSLGYRK

SEQ ID NO: 826 - protein, 1112 aa, synthetic construct
MARAHREVTDQATKEDHNSRRLVRWTPAELLDLAEKEALLMKKGVKFMNEALFPLCPGRSLEAIKGQRRKEAHKELVKAELAKLVTEGLRTAGDEGEGASVEGEEGRGEGQGPSRSGPASGTLDTTQGHLNQRMEPERQNDRQNPRLGTEGRATGLAHLRRDALREGQRQIDMTDSQPEGEEHLTPNVAELLQGAEREVEDGESSCIWTQDVATQEELNEFIRKSTLTTAQSKNAKYEHCRILKGQMELYKDIIGNVWDHEEETGVGADRKVIDDWVREQLLKWVRWEGNPKPKPVRQPDKKQPFISKKKEKARLRQLTQSFYERSPSRCINAVLSGNLEVTQAIPKKELEEYWASIFSRKPEGVVKVDTINRPADTSYSSPISLDEIKEGLRNLKDNSPGPDGLKKSDVAKIPVQVLHAMLLIFQGSSYTPKFLRLGNVTLVPKNAKPENPGQYRPITVTSQLLRLYHGILAKRLVRLPLSKRQKAFLPRDGIAENAFIIEHLIKGARARREDLFLVFMDVAKAFDSLAHTSLLQAAERIGIPSSLREYIALVYEEAEIQFKGGEKKIKQTMGIRQGCQKSAPLFDASLDMCYEKLDPRIGYRVPDPAAPQELCSITQKMRPGGYDITEALFADDGVTVAATRIGSVKNTLLAVRELGKCGMKMNPKKCASLAIRANGRLKKSYVDPTPYLTIDGEVVPALKLGETYKYLGLKIGANGYDIREITKKLIVQLDRLSEASFKPQQRLHALKVNVIGGMLHTLVLVHVSLKTLLNIDRTIRRYVRKWLHLQSDTPTAMFHANTADGGLGIPSMVTRIPRLRRARLVKMTTSDDPLIKIMVSSGTGEAAVRLASGIKRLGEVQIINKQSERRAWREELLSKTDGRGLQYHDGFGDGWILDPMFPAKGGEFIKALRVRCNAMKTPARAARGDRGDPTCRLDKQTANATHISQICQVTHGLRVRRHDGIVKMVRAGLQRIGYTVQLEPKIAIEGTFVKPDIVAWRKDKGFVIDPIICGDNCDPEERYRQKVMTYDKEAVRKYVKEEALRVSGANVKEVEVHGFAINFRGGWSTSTQKLLSRLGLGTSLKHFISIRTLTTTWTIIQTYDRVSLGYRK

SEQ ID NO: 827 - protein, 976 aa, synthetic construct
MRGLNQHIRRGDAKHQEDYHQQQEVSRTKARWDQEEIYMVAKMELKLIDKGCKSIVKELQRSFPHRSLDAIRSLRTKKEQYKQCIEELKVATTNKNANMESTKEDMAKAGSNTSEERDLDSNGRTLFWENNTEPELELVNNWKMLTERNEEIIRKLIDQDIESWLPPKTKRCQAPSKCKQPCKINAKKKRKQEYASIQNLYRKNRGAAIRKILDGKWKNECTEGPSPKTLQRFWKNLFERHSGNDERQPNMKGPTIWELEAPITKREVDQAKKNQSKDSAPGLDNVTTKQLQAIPSMAIAKRFNAWLVSAYVPNRCRQGVTVLIPKVKGTMLPECHRPITMAPTILRLFHRILTARMMNNLPFSNRQKAFRKGDGIAQNLITIKSIIERSQKKLTSLSLAFLDVQKAFDSVNHSTIIKACRRMGIPNMLLSYIENLYQGSTTRLRIRNKLSPEIWINRGIQQGDPLSVPLFLAVMDWVTSNLDPGIGVSMGEAKINHLAFADDLVILSTTDKGLQQQMDRIIEGLSQCGLNINPKKCATFRLRIDGSKKRWTINPEPFLKCQGTIIPSVTVSTFYKYLGIKIGIMSNTSFITENLEPKLGYLTKAPLKPQQRLYSLIVHLIPGLQHSLTFMRTTKKFLKSLDLRIRAAVRGWLKIPKDVPNAFYYTKIHLGGIGIPQLENIIPLMKTNRIGKFCDDADDFSKEIIRQDALPKMCKNWSNPLKVHGFTVTTKKEIEETIAETLYKTVDGRGLKHESETSTVNRWVSNGTGLLSGRDYIGAIACRGGFLHTRLRAARGFPGATVLCDCCNQTESLGHILQTCYRTHKERINRHNRIRDLTAARIRKKNWNIIKEQAIPTQAGIRKPDLICYKESEAVVLDVTIVNDKFSLEDACKRKIEYYRKEDIIRWIKLETGVITVTFGAVVASWRGCVAESTNRLLTYQFGLTNDFFSLLGAIVCTYGYYEWRHFKNATYRIPR

SEQ ID NO: 828 - protein, 1000 aa, synthetic construct
MPDCLSGEGGDPSRRCPLCSRQFKSKAGLSLHLRKGNKEHQEFYHNSQKVVKTKTRWDEEELYLLASEELRLINNKCKAINKELTNKFPHRTMEAIKGVRRQTKYKQLLDRLRDSELERNLNGEESNSGPMKNDQENRISDISPRSSTNPSISIFWENNHKKELDLLHQWSIFSTCDMEEVKTKIDKDLDELLPSRVLKDNTKLIVTSKKTNKKQKRRKEYALIQKMYRKNRSKTIRKVLDGEWKIKNSTEPKLADLEPFWRNIFEKGSEEDHRNPQCKESVVLELEAPITVEEVEYTKRSQKKDTAAGPDGITCKDVMNISSLKLAQRFNVWMFTGYIPQRNKQGLTVLIPKKKGDMRPESFRPITMMPTVIRLFHRILARRMMAQLPINKQQKAFRKGDGIAFNLITVQALLEHHTKNLKPLSGAFLDIRKAFDSVNHSSLHLACKRIGIPDMLLNYIKTLYTGSTICLRVQGEISDPICVNRGIRQGDPLSVPLFLAIMDWAIDGLNTSLGASIGKERINHLAFADDMVIFAASDLGLQYQITHLEKELSKSGLNFNPSKCSSFRLTIDGKKKKWIMNPDKFLKCAGELIPTIKIGSFYNYLGIKIGCMNNSQFVTDVLEKKLTFLTKAPFKPQQRIYTLIKHLIPSLLHPLTFMSTSNKFLKSLDLRIRSACRKWLKMPKDITKGFFHSEPGVGGLGIPQLEYRIPLLKTKRIANFCNEDNTWGNNLITEKALPNMCTKWLKSMKIDGRIITNKKELDEAISNTLHNSADGRGLKDSSTVKSSNYWVSNGSLLLSGRDYIGALACKGGYLHTGLRALRANKNNNALCDCCGRVESLGHILQSCSRTHNHRLARHNRIRDILASRVRKKDWSILKEQAIPTSAGIRRPDLIFFKDNLALVVDVTIVADTANMFEPYEHKVRYYKTTEITNWIKQETGCTDIEYGALVINWRGAICKNSYDLLDTYWKFPGDFYSLLSAITCTYGYYSWRHFKTSTYR

SEQ ID NO: 829 - protein, 979 aa, synthetic construct
MAANPVNDQGKPSQHFPCDGECIICTPRHDAGDPSAARDKFRHAFIGKRRLVKHLKDVHGVREQDITWRCQRCHELHTTYIEASVHFAQCRPRSINGDVEGIGAVTDCRRSSDPEADALERRGTVEGDLIQRSGRNPEGDVERTPSQTRNEQTEILEEPIPPPIHERPVEHQAETNIHICPECQRVFDTKAGLQLHRRNAHREAYNRTLPEPSRRAQFPEEVLRDIAGACLDHPGRAACGKGISQYAVSRFPAYSAEQINALRKRSKYREVELKVRQEREAAVRNAAAVDIPTPDETPHVAGRRERSPEGGLPPPEVPPRDERRTERVERPENLRTEAERRAWDYYDAVCEGGDMNALYEELMEELVTPYRERGRAPRPHRGNQGARAQGPGPSNTATEPATPLIANRNQRKRARYALHQKLYRKGPSALMSELRDPGSTGVTTLPDTAEVARVYGDRFGSDSPQDTHAFQPKAGAEVVELKPFSRGEVLDVIKGIKLDSAAGPDLVTSKMIFEWGVDVLRPIVNSFLRLGRIPDSLRINRTTLIPKKADPESVNDYRPITIGSLVNRAYAKLLTKRLCDKVSLNSRQKAFVPVDGCSEHLFVVGEALEICQKRRKECNLVFLDLAKAFDMVSHCSITRALNRFGVGSGFVEIVADLYAGVSTVIRGKQGPTDQINMARGVKQGCPLSPMLFNMVMDELVDQLGPRHGLKPRPELEAFNCLAFADDLVIASGTVHGMTQLLVTVREFFDDRSMSVNAAKSHTIRLAPAPGTRTVKVVEGSTFSYGGTPIMNRSINETVKYLGLALSPKGPTNFKRDKAVTDLKLIREAALKPEQKLDLIRRILLPAQMHTLRLSRRVLLRELDQLDRIVRRTVRGILHLPPGTPKAFFYMKSVDGGLALPEVTSTVGYTRLKRFVRLKANGDPLVAKYAAASNKLERELRYWVGALGIEDTSLSRLNTAIFYYALVCANAKYKQIFHQK

SEQ ID NO: 830 - protein, 1121 aa, synthetic construct
MEKSSCRICQEDLPENNLQIREHINDVHNIAEIIYRCKLCTKNYNTISSIKSHYPACKRKIGTNIPPNNTIRNIASQVAPPPTPAPTTTNTNNNIAFQCKECQKGNVTFVAKDNKGLVTHMRTKHVQAYEESKKVANIRIAWSNDEDRILASLELQLKAVHKGQILERLTTEWQKLVQESRANVRSKEAIRGRRQQTEYKRTLEELSNTPNGQPTPTTRSPQGQTTTTDNASSVNVDSESIGEIKEALKTYLTAGHTNLTDHMKDAINGFIDNTNSVDPVQLTMSGIMESITTMRNRVGARNQRIPNIPKKTTKNQTRKRKAEMRAYYQKLYAHNKSRLMDEIIEGVAPNTEPPPIHETVKFYENIWSVRAEDNHAVSKKTGIAGDNRTLLSPITKPEILTAISKTKRDSAKGIDTITLHEAKQLANDDLFVAFNIWLGCKSIPAALKLNRTTLIPKGNQNLDKVTNWRPITISSILLRLFNKIMAGRMSKFFQMDKRQLGFTPINGCSMNIAWLNLLLKHARLNKKEINVCLIDVAKAFDSVPHDSIFRALRRHNAPPHLIELIQQQYEDSSTTITYQNLSSKKIKILRGVKQGDALSPLLFNLVTDELFQILGDRFGYTIDNIGSTNIRCFADDMCLVSGTKVGMGNMIRESTQFLNERGLQINPNKCMTIALEKGYKGKKSKIVIEPVFTIQGAPVPILGHTTNTTKYLGVKFTSVGSIKATVIKEQLISVLEKLQKVSLKPFQKIDLLRSHVIPLFVYQLINLELYPKLVKQIDLIIRRTIRSILHLPTSLSNEFFYLSVREGGLGFPVLKNSIGLAKVRIYKSIMRSEDEFLKHLIETHGFPIIRRFLDDLQVSSSFENDDLAQRKRELKIERNNSFAQKVHGYGSEIFAKCPLTNSWLHAGYKTLTGRNYINGIKLRTNTFETKVTTNRGLAVDKTCRRCHKENESLMHVIQFCNNTKGLRYRRHNQICSRICQKLRERGFDVFSEKAFTTDVTGLPNLLRPDIIAKKDGKAIIIDVQCVYESTTGSFTNAANSKIQKYTPLIEAVKNQLNCTEVEVTAMIVGSRGSFHRGHLHQWYQMGFSTTELKYLALNCMENSIRILLSFNRGCQGSTDNP

SEQ ID NO: 831 - protein, 1121 aa, synthetic construct
MEKSSCRICQEDLPENNLQIREHINDVHNIAEIIYRCKLCTKNYNTISSIKSHYPACKRKIGTNIPPNNTIRNIAPQVAPPPTPAPTTTNTNNNIAFQCKECQKGNVTFVAKDNKGLVTHMRTKHVQAYEESKKVANIRIAWSNDEDRILASLEIQLKAVHKGQILERLTTEWQKLVQESRANVRSKEAIRGRRQQTEYKRTLEELSNTTNGQPTPTTRSPQGQTTTTDNASSVNVDSESIGEIKEALKTYLTAGHTNLTDHMKDAINGFIDNTNSVDPVQLTMSGIMESITTMRNRVGARNQRIPNIPKKATRNQTRKRKAEMRAYYQKLYAHNKSRLMDEIIEGVAPNTEPPPIHETVKFYENIWSVRAEDNHAVSKKTGIAGDNRTLLSPITKPEILTAISKTKRDSAKGIDTITLHEAKQVANDDLFVAFNIWLGCKSIPAALKLNRTTLIPKGNQNLDKVTNWRPITISSILLRLFNKIMAGRMSKFFQMDKRQLGFTPINGCSMNIAWLNLLLKHARLNKKEINVCLIDVAKAFDSVPHDSIFRALRRHNAPPHLIELIQQQYEDSSTTITYQNLSSKKIKILRGVKQGDALSPLLFNLVTDELFQILGDRFGYTIDNIGSTNIRCFADDMCLVSGTKVGMGNMIRESTQFLNERGLQINPNKCMTIALEKGYKGKKSKIVIEPVFTIQGAPVPILGHTTNTTKYLGVKFTSVGSIKATVIKEQLISVLEKLQKVSLKPFQKIDLLRSHVIPLFVYQLINLELYPKLVKQIDLIIRRTIRSILHLPTSLSNEFFYLSVREGGLGFPVLRNSIGLAKVRIYKSIMRSEDEFLKHLIETHGFPIIRRFLDDLQVSSSFENDDLAQRKRELKIERNNSFAQKVHGYGSEIFAKCPLTNSWLHAGYKTLTGRNYINGIKLRTNTFETKVTTTRGLAVDKTCRRCHKENESLMHVIQFCNNTKGLRYRRHNQICSRICQKLRERGFDVFSEKAFTTDVTGLPNLLRPDIIAKKDGKAIIIDVQCVYESTTGSFTNAANSKIQKYTPLIEAVKNQLNCTEVEVTAMIVGSRGSFHRGHLHQWYQMGFSTTELKYLALNCMENSIRILLSFNRGCQGSTDNP

SEQ ID NO: 832 - protein, 1085 aa, synthetic construct
MYRVAAVNSRGTGSNNNNQALLSRTSSLIKIASERPIDVLALTETHHSNVHNDLSAAAQESGYSIAAHSQRPQSGRNSYAGIILLCRRDSVTRTTQLPPFTDEALSGRALAVTVEFADASTWNLLFVYAPATNRLRPAFFKLLASSLPEGFTPDMCIGDFNMNANRPTPKYFVKFCSNVDLHDSWEPNGDCPWFTFHRNKFRSRIDLSLISAPMLKSQRVITTHQVLHSKLDHLAVISEISHLPCVHTPCSNKKFRLFDPSLASSKLLNMDIEKACKEYRHDQCIELYDRILNICNMHDEMTTQRKRRLARERRLLAEANSTDLDTCIAQSIKREIQALESTTGRIQDALNLKNSLAPGKYGYIKHVMRNALPESSIGALIDQNNTLRDASEAHLVLGETLNNVCGTTIPTDITYLDKFGEHWPDEMKCSMEHVTSTISLNEMETTLKGLEGAKSPGPDRLPAWLFKRFAKQLAPFLVNLMNGILDGDEMPECFKESRTIYILKKQGLDKTITSNYRPISLMNVIAKVFASIINRRLRHKIELVISKSQHGFTPNRSILDAILNVDTILKSLKDDGKASAVFLDIAKAFDSVEHSAILYAMKCAGFNDTVVQLINRWISNNHTTVIVNGKKSSPIHLARGVRQGDPLSPILFVLTMDLLHKRITGRIKGIKPMKDFERIPIAGFADDTALFPRNDFQLKRCMSMLRHFKLATGMEIAIHKCSYVTKNENSEKRLHNLNMKPIPNITDKDTERYLGAELHSAGVKDTLSIRIDKAIKKMEMLRGIKYIHQRAKVVKTFIWPMLYYWFSFEELSKEDANRLNTATWNYVYTGHPSFKSKLSKIKRQQDANKFSDGGIGLFDIWEFANHQNAKQYNTALSKQNDQVWAHKWINKPNKKARNFKKKWKKATYEQNMKDLNEWKKYQPKPPEIKLECQTSKPKIWNKIISLPVHPTVKNFIFKRCRRMVRTVKECIYCQESGYTHIIHGECQMNQGNKYSMEDFLNSFNNRKHNQGLDWSGVTPHVTPAEVANTWYANWFTYQAENNWLDGEHTNTPPSTTESSNAIRAKVLETLSQITGQLTPNPLGSM

SEQ ID NO: 833 - protein, 1200 aa, synthetic construct
MHESQAHQPEYKKELESKHDDKQPEHVSLEKLAALEATSKVVSIKAMTAATGLTTHQVRYLREKAIYKQYLDKAKKEQAAKAKSIFKAAPKPSTLLSTASRIVPTASASGASRKTAVQPPNALPTQARRETPPASDASTCTACTKVTTSGRDHTPLPPAATTQPSPPSHIFTEDNKRRRISSPSLPPGLASDTKKKRTMGSPQRPTPPCRQTIQTSGTAAATLSRTKQQQATLGIVPPAAASKPSSVSAPPAASAAANTPKRQRSPSQSPQAQQAPALRAAHTRILSPNTNTPTSQPTGSRTPLNPASTPRRDKMEAEFRQALEATLVVEEPCPGLHKIVRSALSDSPDRLQIAIDDFYENAWVREKPRKARKPPRPPHNYGNLHHGRGRRAAEYKKAQDMFARDKKGLADVILEGKELLTPPELPSLASTEDLFAGIWESGSTSDQQRPYVPHFSARALPPIFANDVELARERWHRAGAGLDGITIPQVCRMDPNMLATLFNIIIMRGIFPSAWRDLRTVLIHKGGIRSDPNNWRPISIASALQRLFHRILLRHLSAITSLDHSQRGFRSVDGTFANAVLLDGYIRSRRAAGKSFNIVGLDLRKAFDSVSHEAIRTAIANAGVDHRLAGYLLATFQGSRTHLELGPSRSRPIHLLRGVKQGDPLSPLLFNLVLDPMLTYLATNFKGGTLPGGAKVPAIAFADDIFLLSDDDSEIPLMLYAFGEYLAQQGLAVNPRKCVSISATTVQGKTMVRTKCLFRIGGALIPTVGSVNTFKYMGHQFGERGLQQSSLTTLNTWLERLSRAPLKPHQRMALLRDHVIPKLLHGLTSPVTTGEKLREADRMIRRFVKRTLHLQEHTANQFIHARLRDGGLGITELRRAVPEITLKRCRGLLTVPDDPTLASFGSSEYFETILARVSRLAGARPCHEVHREQIRTGAFSAGLELVSDDIASRQWLTTKPQGWTGRDFVKAVHLRTNNLPTMDHPSNPPHLRLCRAGCQKNESVKHILQQCQQVDGLRSKRHNEIAAKIARAASKKWEVEWEPRVLGLPDINNKRQLFKPDLAIHKPEHLVIVDVQVSWENSEASIREAWDVKRAKYSSPEFLAAAERRWPGRRITTLPLILGARGIWPNINRVTADELQLSAAVKRSCVESCLKWGPSMHRTFMAGVWASSREGRPNGIGYRSARRPTNNQSAISSRGG

SEQ ID NO: 834 - protein, 1200 aa, synthetic construct
MHESQAHQPEYKKELESKHDDKQPEHVSLEKLAALEATSKVVSIKAMTAATGLTTHQVRYLREKAIYKQYLDKAKKEQAAKAKSIFKAAPKPSTLLSTASRIVPTASASGASRKTAVQPPNALPTQARRETPPASDASTCTACTKVTTSGRDHTPLPPAATTQPSPPSHIFTEDNKRRRISSPSLPPGLASDTKKKRTMGSPQRPTPPCRQTIQTSGTAAATLSRTKQQQATLGIVPPAAASKPSSVSAPPAASAAANTPKRQRSPSQSPQAQQAPALRAAHTRILSPNTNTPTSQPTGSRTPLNPASTPRRDKMEAEFRQALEATLVVEEPCPGLHKIVRSALSDSPDRLQIAIDDFYENAWVREKPRKARKPPRPPHNYGNLHHGRGRRAAEYKKAQDMFARDKKGLADVILEGKELLTPPELPSLASTEDLFAGIWESGSTSDQQRPYVPHFSARALPPIFANDVELARERWHRAGAGLDGITIPQVCRMDPNMLATLFNIIIMRGIFPSAWRDLRTVLIHKGGIRSDPNNWRPISIASALQRLFHRILLRHLSAITSLDHSQRGFRSVDGTFANAVLLDGYIRSRRAAGKSFNIVGLDLRKAFDSVSHEAIRTAIANAGVDHRLAGYLLATFQGSRTHLELGPSRSRPIHLLRGVKQGDPLSPLLFNLVLDPMLTYLATNFKGGTLPGGAKVPAIAFADDIFLLSDDDSEIPLMLYAFGEYLAQQGLAVNPRKCVSISATTVQGKTMVRTKSLFRIGGALIPTVGSVNTFKYMGHQFGERGLQQSSLTTLNTWLERLSRAPLKPHQRMALLRDHVIPKLLHGLTSPVTTGEKLREADRMIRRFVKRTLHLQEHTANQFIHARLRDGGLGITELRRAVPEITLKRCRGLLTVPDDPTLASFGSSEYFETILARVSRLAGARPCHEVHREQIRTGAFSAGLELVSDDIASRQWLTTKPQGWTGRDFVKAVHLRTNNLPTMDHPSNPPHLRLCRAGCQKNESVKHILQQCQQVDGLRSKRHNEIAAKIARAASKKWEVEWEPRVLGLPDINNKRQLFKPDLAIHKPEHLVIVDVQVSWENSEASIREAWDVKRAKYSSPEFLAAAERRWPGRRITTLPLILGARGIWPNINRVTADELQLSAAVKRSCVESCLKWGPSMHRTFMAGVWASSREGRPNGIGYRSARRPTNNQSAISSRGG

SEQ ID NO: 835 - protein, 1200 aa, synthetic construct
MHESQAHQPEYKKELESKHDDKQPEHVSLEKLAALEATSKVVSIKAMTAATGLTTHQVRYLREKAIYKQYLDKAKKEQAAKAKSIFKAAPKPSTLLSTASRIVPTASASGASRKTAVQPPNALPTQARRDTPPASDASTSTACTKVTTSGRDHTPLPPAATTQPSPPSHIFTEDNKRRRISSPSLPPGLASDTKKKRTMGSPQRPTPPCRQTIQTSGTAAATLSRTKQQQATLGIVPPAAASKPSSVSAPPAASAAANTPKRLRSPSLSPQAQQAPALRAAHTRILSPNTNTPTSQPTGSRTPLNPASTPRRDKMEAEFRQALEATLVVEEPCPGLHKIVRSALSDSPDRLQIAIDDFYENAWVREKPRKARKPPRPPHNYGNLHHGRGRRAAEYKKAQDMFARDKKGLADVILEGKELLTPPELPSLASTEDLFAGIWESGSTSDQQRPYVPHFSARALPPIFANDVELARERWHRAGAGLDGITIPQVCRMDPNMLATLFNIIIMRGIFPSAWRDLRTVLIHKGGIRSDPNNWRPISIASALQRLFHRILLRHLSAITSLDHSQRGFRSVDGTFANAVLLDGYIRSRRAAGKSFNIVGLDLRKAFDSVSHEAIRTAIANAGVDHRLARYLLATFQGSRTHLELGPSRSRPIHLLRGVKQGDPLSPLLFNLVLDPMLTYLATNFKGGTLPGGAKVPAIAFADDIFLLSDDDSEIPLMLYAFGEYLAQQGLAVNPRKCVSISATTVQGKTMVRTKSLFRIGGALIPTVGSVNTFKYMGHQFGERGLQQSSLTTLNTWLERLSRAPLKPHQRMALLRDHVIPKLLHGLTSPVTTGEKLREADRMIRRFVKRTLHLQEHTANQFIHARLRDGGLGITELRRAVPEITLKRCRGLLTVPDDPTLASFGSSEYFETILARVSRLAGARPCHEVHREQIRTGAFSAGLELVSDDIASRQWLTTKPQGWTGRDFVKAVHLRTNNLPTMDHPSNPPHLRLCRAGCQKNESVKHILQQCQQVDGLRSKRHNEIAAKIARAASKKWEVEWEPRVLGLPDINNKRQLFKPDLAIHKPEHLVIVDVQVSWENSEASIREAWDVKRAKYSSPEFLAAAERRWPGRRITTLPLILGARGIWPNINRVTADELQLSAAVKRSCVESCLKWGPSMHRTFMAGVWASSREGRPNGIGYRSARRPTNNQSAISSRGG

SEQ ID NO: 836 - protein, 1246 aa, synthetic construct
MGDRVKTAQDAGSKTSSCQRDAPPANAQFVCVSCNSRFDRKSSLSLHSKSCGNTRTKCNYCTVSLTTYKLIRQHERRHHNAEYMRDLEAEKPTPDSAYFAKLAAMEAAAKGGVVSIAAMVTATGLTTHQIRTKRSKPVYQKYLEMAKRDQVAKSKLLFGATSSATSPSTSTSVTNATTTASPPSRAVTVSRQHSADGTAPRKNASSSYTRGPCPKASTSASPPGPPPPSVARIETQTDDGKRRRLSSPTVPAGVPTSERKKKRLQGSPLRPTTSRLLPNTTSASATGLPADTPQENASPGPDPPPAAPNKPADRPPAPLGDESALQQPEAPITSCKRLRSPSLSPAMPLAPALRRTSATVTPLRTRLPHAPPPRLNRDSAMASEFRLALEAVLEAEEPCPGIHRLVTSALSDNNSMFQARLDEFWAATWPTTTSRERRRPPRPSGYGSVHHGKGTRAAEYKKAQELFGKDKRGLANTILEGRPILTPPEVPSIQQVEDVFAAIWEADVADGPIAATSPHIPVPSMPPIFEADVQLAREHWMKSAPGPDGITVAQVCRMNPRVLATVFNILLLRAAVPSSWRVLRTVLIHKGGSRTDPNNWRPLTIASTLQRLFHRVLLRHLTSHTTLHPSQRGFRSVDGTFANAVILDAYIKSRTGQGKAWNIVGIDLSKAFDSVSHNAISKALALAGVDERLATYIITSLTGCATQLDLGGKKSRPINIQRGVKQGDPLSPLLFNLVLDPILQHISTCFKGGTIPGGDKVPVIAFADDLFLLADDDLEIPLMLHMLEEYLTQQGLRINARKCVSISAATIAGKSVVRSKSHYRISESLIPCVGNMNSFKYMGHQFSEKGMMPYNLGNLRTWLERVLKAPLKPHQKMCLLKDHVIPKVLHGLSSPATTGDKLREADRLIRRFVKRALHLQIHTANHLIHARIRDGGLGVLELRKTIPEVSLRRCRGIANATSDPVLASFTSSDHFLKLVNKLEKLAGTVPSTEANRSLIITSPSSSGLEAAADDPASRQWLQSLPQGWTGRDFVRAVHLRTGNLPTRDHHSNPPELRKCRDGCEENESLRHILQLCPRVQAHRIRRHNEIASKVANAMRRKWTVEWEPHVKHEDRKLYKPDMAIHLPDQLVIVDVQVAWEWKENSLAVAWDAKRNKYTTPHFMEAAARRWPGRRVTTLPVILGARGIWPSCNRTTVNTLNLSSALRRSCVESCLKWGSTIHKQFMASVFSQSTRSRPQGLSSRDAG

SEQ ID NO: 837 - protein, 1174 aa, synthetic construct
MNSTPKSLASDERLCAIDLVPASEGSIGCNGARPSRSTDNEPGLSQDYILEIPFTQRACAYCITSGEGTFMALSLADEDRHAREKHAERTRVYKCTQCNKTYKTRRGGENHVAKCTGPPSPRANALLCNECGASFNNQLGLSQHQRHAHPATRNELRVAEFAPKERKSSGGPVFSSEDVELMLELEVRFREQRYIAKLMSEFLPGRTLAQIRNKRREAAYKRRLFESSAIEIDEADVTDEASSECLPSSTSHDDQDFPEVFGNSPNNNADPSPPEQPWREGIINSALSYMPVKQTPAGSETIITLLKEALAHCKANQGIITQEYTDRVYNEVLAHFMPKAGKETGSETKRKRTKGNGGRLARRKYIYARTQELYKKNPSLVAKMVREGKTHLDEQKCSVEMTEVKELYDSLWGTEPKTNKALWCDGGEDNHVSHRVPLEEAIPYITTSEVAKQIARTRTGVAPGPDGLKKGQLNHGSHPYILHLLFNLIATSGQQPTEWRKNRTTLIPKDGKDGSKAENYRPLTISSLLSRLYWGIIDSKLRVVTKFSTRQKGFVSEAGCFNNVHIFNELLRHSKANQGMVATILDVSKAFDTVPHSAIGPALKKLGLDEWVVRLVEDGYANVQTEISHNDGPININLKRGVKQGDPLSPFLFNAVLDSLLHKLENCPGYKITETEQISVLAFADDLILVSTDVRQAKILLAKTEAYLNSLDMKLAAAKCSAFRIQKHKDTWSLTNPELRLKGGDIPFANADLNITYLGAKISPWKGINIEGLESSFISCLHRTMKLKLKPAQKVALITTYHIPHYLYPLTLAIPSQNVLRRLDQALRNTIKQIYHLPQSTANGLLYCGKKDGGLGIPRLEVVARAATLKTGLRFGASADPVMRALFDNGLSSQLKTVAQASRLPWPVTIKEVDTFKLRARKRELAEWSTLKSQGKSVRSLTDDPIGNAWLTDTSLLKPCRMVTALKMRSNVTAARVSLNRAIPQSDLNCRKCGTKLETLGHILGECTHTKPQRIRRHDEIVDFITNEITKRDKKAAVTKEPSIALPTGGNLKPDLVTENRGRVYVVDVSVRHEDKDYLARGRKDKINKYQKLLPDLQSRFGATAGEVLPILVGTRGAMPKETLDALKKLGITDRKSLLTISLIAHRCSIEIYHQFMDYDAHSKRNGAEEGRRP

SEQ ID NO: 838 - protein, 1339 aa, synthetic construct
MGKLVYKTTMHHPVPRGGAGAHDDGVTCDRCGKVCKSRGGLKLHRRACLTGGVSGLSSAQAPAGGVVSPDRTSLGKGSSRNGSASGLSSARSPTTDVSRTISAREGRDEGGNSIVGGLRADALECRVVVERLATTRPPATVSDSVAATIVGGNRADALECREAVDPVPASRPPDSEVASAVLQVESDGLLAAGGPPSDASSPEESRAGVRSRPGVLCGSCGRSFGDKRGLSQHERVAHPADYHSRLAIGHRTGSKRRWTYEEKVLVARAEVSLSGTESLNAKLSLAFPERTFDAIKSLRRNPAYRALVHEIRSEGAGGADGSATASAASDPSGGAGASGVTPECSAQGAPGVPASQEEAIRELADACRADSDALCLSPEELGELIALVDSSVRDPSGPSGQRVQALVDKEYDQWVKSLPIPQPKASQSVPEHSGASSCRGRRRRPRGARPTPGSPGVRTLSKRQQRRRLYGIVQELYRKNRTRCAKTVLSGDWAKEKRTTSLEEQDSYWRPLFEEPSKADSRDPRPVSRALFEISQPVTATEYGLVLKSTHESSPGLDRVDRKVLRGIGPRIGVAHMNLWLLACRPPGAFKVGVTVPLPKSADAADPAEFRPITMATMVCRLFHRLLAHRAERHLPLGARQKAFREGDGLADNVWILRSLIEDCKARHRPLCVTFVDVRKAFDTVSHESVVTAAERIGFPPGLVSYIQCLYTGGVTQLRVGRVLGSPIHPARGVRQGDPLSPLLFCAVMHWVLSQLDARLGLQLAGGVRVNHLAFADDVALMSSCPIAMKRLLCELESGMEMVGLRPNAAKSASLRISVSGKVGKWFCHPEPFLSLAGGPVPAIDIQGSYKYLGIRTGAGRKVGEAVTNKLEEGLEQLSKAPLKPEQRLFFLRVHVLPSLYHETALCKYSKGLLKNLDRESRAAARRWLHLPHDVPQALFHASPDEGGLGLPELLVQVPLMRRARVEKLFQRATEDRDPVLAAVIGMSRELRRERQRWEGGVPCYSRKVTDRTGRGRATAAALHQSCDGCGLSDTREVPAVSRWVTSGTRVASGKSFVDAVHIRAGCLYSKVRASRGRSGAPGAVDLQCEVCPARRETLAHVVQQCPRSAHARDERHNRVAKLLIQKLTASGFQVEAEPAIKTDYGVRRPDVVAYKPGEKAVIIDVTVVADLPGELSNAHDRKSNKYDDPQIRAWVARRSGVSTTAVSLTSLTFNWRGALHGRSAQDMVSLGVSLGTLEVMSLIVLEWGHRAWRESRDATWIRMDQVPYCPASSRSRDETGPHHHTGSSRRRHLAARPPQPVCPRGTGRHGRPVQAGTPGRGRHQPGPAGARGVVPSSR

SEQ ID NO: 839 - protein, 1261 aa, synthetic construct
MNSIAHTFGGLGPDHRLNRPRPRGPPFGGTDPDHRRNSGGRSIDEHGLEPDTGHGDVTDALQLANSNEIILPVPFDSKSCEACLKQRKGDFILLNLNAAVQHARSHHCGVGVLYACKTCGKTYKTKHAAQCHVPKCSGPATSEGKSVICGLCSQAFKTQRGLSQHERLIHPVERNAKREMAGTGKTGRGLNKGYGKVWQKEEVEIMLRLEKTLKGHPQIAKQMMEHLPGKTSKQIRDKRKEASYKALVEHCVSTPGHSSNPGPLESICSSSDSETEIRPVPTIGHVSETEDEISSDEGQYTRQLSPASPVIGQTSLAQRQLTETTQRPGLLLQAGEGPSPIHNEAASPEHKHTRPQSPIGAGEIPGDEDKAEHEWRNDIIRQAVADTKENSTISSKCRELRSRMISILTDIGEGGPLATQTLIDDVYAQVLEQIESTQATRASKRSRRKGPKTQAGSKRRRKRYRYARTQDLFRKNPNLLARYVREGTPWLENEDSSSPKPEDVKSFYSCLWGAAPNITIPFSVTGFGRKALELGEVFQAITARDINERLKHTRHNTASGPDGIERKHITGLDLREILRIFFNIILVSKIQPKAWNTNRTILIPKQGKDGSRVENYRPLTIGSLICRTYWGIVDRKLREVVSFSPRQKGFVHETGCFNNVHILNETIKAAKQSKGLVAVQLDVAKAFDTVPHAAIEAALRRLGLPTGVRESIMNSYTSLTTTIEYAESRTEVSLKRGVKQGDPLSPFIFNAIVDNLLEPLEQMKGYVIDESHSLSALAFADDLILLATTKDKAQSLLHHTESYLKNLGMRIAAEKCASFEIRCTKDSWYIANPDLCLSNGDKIPNSAADSSLCYLGGHISPWSGLRYNDLVAQLETTLERCRSAHLKPHQKLSLTTTHLIPHFLHKTVLATPPITTVRAMDQTIRNHVKVVLHLPMSTPNGLLYCSKRDGGLGIPKLETIVTSSALKQGITLLNSLDPAIHALLQESKLEQRLESLAKHARLQWPILNLRVIDSHKKRMKTDELKAWGQLRSKGKGVASFADDRNGNAWLYNPNLLKPSRFLTALRLRGGMTSDKVTMNKVVPQLNVKCRKCRACNETLAHILGQCIYTKAQRIRRHDEIRDYVSKKLASMKEVQIIEEALIPTPTGNLKPDLVVVNQGRVHVVDVTVRHEDTGYLDEGHKSKVEKYTPLLEILAEQLKVDRGRVLPLVVGTRGCMPVATIDSLREININDRGSYITISLLALRSSIEIYHTFMDYNALVA

SEQ ID NO: 840 - protein, 1158 aa, synthetic construct
MGSLNLREDMDNENGNGYDPAHRHRHNRGSEDGNPSEDLDAENGNATDALQRDATTEIILPIPFTSTSCATCLRHRKGDYILLNINAATQHARSHHGGIEVKYSCSKCGKTYKSKHATQCHVPKCTGPPTREANNAICGICKQGFKTQRGLSQHERLVHPAARNEKREQAATSRGSHKTNKGYGKVWRKDEVDTMLRLEKTLQGHPHIAKQMMEHLPGKTAKQIRDKRKEPSYKALTEQYYSETEKPRESTRTSSDSEEEIRPVTRKRYALETEDEYSTDLEQEPRQPDHSPAATGQTSLAHEQPIEEQLPHLMRPACEGPNTSNAETTEQRPASPQSPIRVGGTPGNEDGAEQQWQTDILRQTLAATSEDLPVSSKCKDLHLRLVSLLKEIGDEQQPVTQALIDDIYAQVLAQIETTQTKRTAKFTKRQGPKTQAGRKRKRKRYEYARTQDLFRKDPKLLAKYIREGTPWLEEKDPSSPTPKDVKSFYSTLWGAAPNITIPFAVTGLGRIARDIGEVFQAITTRDINERLKYTRQNTASGPDGIQRKHLTGSDTKEILRILYNIILVSKIQPRAWNTNRTILIPKQGKDGSRVENYRPLTIGSLICRTYWGIIDKKLREVTSFSPRQKGFVREAGCFNNVHILNEIIRAAKKKKGLVAIQLDIAKAFDTVPHKAVEAALKRLGLPMGVRESIMNSYKDLTTAIEYAGSKIEVPLLRGVKQRDPLSPFIFNAIIDPLLEDLEQMKGYMIDESHYLSALAFADDLILLASSKEKALSLLHRTESFLTNLGMRIAAEKCASFEIKTTKDSWYIASPDLSLTNGDKIPSSAADSTLCYLGGHISPWSGLQYEALVAKLETTLERCRSAQLKPHQKLSLTATYLVPHFLYQTTLVTPPVKTLRALDQTIRNHVKVVLHLPMSTPNGLLYCSKRDGGLGIPKMETLAACSALKQGITLLNSLDPTTRALLQETKLEQRLENLAKTMRLPWPILNVRAIDSYKMRMKKDELKAWSLLPTKGRGVTAFADDRNGNAWLYNPYLLKPSRFLTALRLRGGMTSDKVTMNKVVPQTFVRCRDAESSVEDLGTGRGVVLGRAVATLRSRLEDSSCRRDETSSHFFCFRAVRGSGMKANFFKVPPCVVVVPRLPHPRLQPHHSLSSSFIY

SEQ ID NO: 841 - protein, 1207 aa, synthetic construct
MDTERGDVPDALQNADKHEIILTVPFDSKSCGTCLNQGKGDFILLNLNAALQHAKSHHCGVGVTYACKTCGKTYKTKHAAQCHVPKCSGPLTAEGKTVICGLCRQAFKTQRGLSQHERLIHPVERNAKREMAETGKSGRGLSKGYGKVWQKEEVETMLRLEKSLKGHPQIAKQMMEHLPGKTAKQIRDKRKEASYKALVEHCPPTPRPEPLESICSSSDSEPEIRIVPTIGHVSESEDEISSDEGQCTRKLSPKSPAICQSRLAQRQLTETTQPGLSLLAGESPSPRHIETVSPERMHTRPQSTIGAGESPGDEDKAEHEWRVEIVRQAVAETKENSTLAKKCRDLHLRMISILTDIGEGGPLATQTLIDDVYAQVLEQIESTQTTRASKRSRRKGPNTQAGSKRRRKRYRYARTQDLFRKNPNLLARYVREGTPWLESEDSSSPKPEEVKSFYSSLWGAAPNIQIPFSVTGFGRKALELGEVFQAITVRDINERLKHTRHNTASGPDGIQRKHITGLDMREILRILFNIIMVSKIQPKAWNTNRTILIPKQGKDGSRVENYRPLTIGSLICRMYWGIVDKKLREVVSFSPRQKGFVHETGCFNNVHILNETIKAAKQSKGLVAIQLDVAKAFDTVPHAAIEAALERLGLPNGVRESIMNSYGSLSTTIEFAGSKTEVSLKRGVKQGDPLSPFIFNAIVDPLLEQLEQMKGYVIDESHSLSALAFADDLILLATTKDKAQNLLHHTESYLNDLGMRIAAEKCASFEIRSTKDSWYIANPDLCLSNGDKIPNSAADSSLCYLGGHISPWSGLRYNDLVAQLETTLERCRSAQLKPHQKLSLTTTHLIPHFLHKTVLATPPITTIRAMDQTIRNHVKVVLHLPMSTPNGLLYCSKRDGGLGIPKLETIVTSSALKQGITLLNSLDPAIHALLKESKLEQRLEGLAKHARLQWPILNFRVIDSHKKRMKTEELKAWSQLRSKGKGVASFADDRNGNAWLYNPNLLKPSRFLTALRLRGGMTSDKVTMNKLVPQSNVKCRKCRACNETLAHILGQCVYTKSQRIRRHDEIRDYVSKKLASMKEVQIIEEALIPTPTGNLKPDLVVVNQGRVHVVDVTVRHEDTGYLDEGHKSKVGKYTPLLEILAEQLKVERGRVLPLVVGTRGCMPEATLDSLREININDRGSYITISLLALRHSIEIYHTFMDYNAPVA

SEQ ID NO: 842 - protein, 1261 aa, synthetic construct
MNSIAHTFGGLGPDHRLNRPRPRGPLFGGTDPDHRRNSGGRSIDEHGLELDTEHRDATDALQLTNRNEIILPVPFDSKSCEACLKQRKGDFILLNLNAAVQHARSHHCGVGVWYACKTCGKTYKTKHAAQCHVPKCSGPATSEGKSVICGLCSQAFKTQRGLSQHERLIHPVERNAKREMAGTGKTGRGLSKGYGKVWQKEEVEIMLRLEKTLKGHPQIAKQMMEHLPGKTSKQIRDKRKEASYKALVEHCVSTPGHSSNPGPLESICSSSDSETEIRPVPTIGHVSETEDETSCDEGQYTRQLSPASPAIGQSSLAQRQLTETTQRPGLLLQAGEGPSPIHNEAASPEHKHTRPQSPIGAGEIPGDEDKAEHEWRNDIIRQAVADTKENSTLSRKCRELRSRMISILTDIGEGGPLATQTLIDDVYAQVLEQIESTQATRASKRSRRKGPKTQAGSKRRRKRYRYARTQDLFRKNPNLLARYVREGTPWLENEDSSSPKPEDVKSFYSCLWGAAPNITIPFSVTGFGRKALELGEVFQAITARDINERLKHTRHNTASGPDGIERKHITGLDLREILRIFFNIILVSKIQPKAWNTNRTILIPKQGKDGSRVENYRPLTIGSLICRTYWGIVDRKLREVVSFSPRQKGFVHETGCFNNVHILNETIKAAKQSKGLVAVQLDVAKAFDTVPHAAIEAALRRLGLPTGVRESIMNSYTSLTTTIEYAESRTEVSLKRGVKQGDPLSPFIFNAIVDPLLEQLEQMKGYVIDESHSLSALAFADDLILLATTKDKAQSLLHHTESYLKNLGMRIAAEKCASFEIRCTKDSWYIANPDLCLSNGDKIPNSAADSSLCYLGGHISPWSGLRYNDLVAQLETTLERCRSAHLKPHQKLSLTTTHLIPHFLHKTVLATPPITTVRAMDQTIRNHVKVVLHLPMSTPNGLLYCSKRDGGLGIPKLETIVTSSALKQGITLLNSLDPAIHALLQESKLEQRLESLAKHARLQWPILNFRVIDSHKKRMKTDELKAWGQLRSKGKGVASFADDRNGNAWLYNPNLLKPSRFLTALRLRGGMTSDKVTMNKVVPQLNVKCRKCRACNETLAHILGQCIYTKAQRIRRHDEIRDYVSKKLASMKEVQIIEEALIPTPTGNLKPDLVVVNQGRVHVVDVTVRHEDTGYLDEGHKSKVEKYTPLLEILAEQLKVDRGRVLPLVVGTRGCMPVATIDSLREININDRGSYITISLLALRSSIEIYHTFMDYNALVA

SEQ ID NO: 843 - protein, 1272 aa, synthetic construct
MDNFDPAIPTDNDMNFDGISPAHRRRLRPHRAFDGNSPVHRRRLRPNRGPLPDDLSEDVDNAYRDATDALLSRATMEIILPLPFTSRSCESCLHQGKGDFILLNLNAALQHARSHHCGVRVLYSCNTCGKTYKGKHAAHCHVPKCRGPPAGQDKTVICGICNEAFKTQRGLSQHERLKHPVERNEKRERAMTDRPSQRPNRGYGKVWQKEELDTMIRLEKLLRGHPNIAMQMKEHFPNKTLKQIRDKRREPTYRALAELYDASQGHSATPELLEVICPSSDSETESRPVHTGLHISETEDEDTSDQGQFSRRLSPSSSRSGQASLAHRHLTEFERLPGLERPADDGLPPRREDADDREQQVNITPSKESGATDDLGSATMTEQEWRTGIIRQTLAEAPDGSTLSSKCRDLHSRLVSILTDISDGQLLATQALVDDVYARVLAQIESSQTTHASKRSRTRGPKTQSGRKRKWKRYRYARTQDLFRKNPNLLARYIREGTPWLEDEDSSSLKQEDIKSFYTSLWGTTRNISVPFSVTGSGRIARNIGEVFQAITARDIKERLTHTRHNTASGPDGIQRKHITGQDIKELLRILYNLILVSKIQPTAWNANRTILIPKQGKDGSRVENYRPLTIGSLICRTYWGIVDRMLRELIHFSPRQKGFVHETGCFNNIHILNETIKAGKNRNGLVAVQLDIAKAFDTLPHKAIEAALERLGLPSVARESIMNSYTNLSTNIEYAGLKTEVPLRRGVKQGDPLSPFVFNAIMDPLLDQLEQMKGFVINESHSLSALAFADDLILLSDTKDKAQRLLNHTESYLNALGMRIAAEKCASFEIRPTKDSWYIINPDLSLTNGDKIPNSAADSSLSYLGGHISPWSGLHYKDLVDQLATTLERCRSARLKPHQKLSLTTSHLIPHFLHKTVMATPPISTIRAMDQTIRNHVKVVLHLPMGTPNGLLYCSKRDGGLGIPKLEALATSSALKQGTTLLNSLDPAIHALLQETKLEQRMQSLAKAMRLQWPILNFRVIDAYKKRMKTEELKAWSQLKVKGRGVQSFTEDRYGNAWLYNPNLLKPSRFLTALRMRGGMTSDKVTMNTVVPQSNVKCRKCRTCNETLAHVLGQCIYTKAQRIRRHDEIRDFVTKKLAAMKEGVKIIEEALIPTPTGNLKPDLVVVNQGRVHVVDVTVRHEDTGYLDEGHRSKVEKYTPLVEILAEQLQVERGRVLPLVVGTRGSLPKTTIDSLREININDRGSFITISLLALRNSIEIYHTFMDYNALVA

SEQ ID NO: 844 - protein, 1272 aa, synthetic construct
MDNFDPAIPTDNDMNFDGISPAHRRRLRPHRAFDGNSPVHRRRLRPNRGPLPDDLSEDVDNAYRDATDALLSRATMEIILPLPFTSRSCESCLHQGKGDFILLNLNAALQHARSHHCGVRVLYSCNTCGKTYKGKHAAHCHVPKCRGPPAGQDKTVICGICNEAFKTQRGLSQHERLKHPVERNEKRERAMTDRPSQRPNRGYGKVWQKEELDTMIRLEKLLRGHPNIAMQMKEHFPNKTLKQIRDKRREPTYRALAELYDASQGHSATPELLEVICPSSDSETESRPVHTGLHISETEDEDTSDQGQFSRRLSPSSSRSGQASLAHRHLTEFERLPGLERPADDGLPPRREDADDREQQVNITPSKESGATDDLGSATMTEQEWRTGIIRQTLAEAPDGSTLSSKCRDLHSRLVSILTDISDGQLLATQALVDDVYARVLAQIESSQTTHASKRSRTRGPKTQSGRKRKWKRYRYARTQDLFRKNPNLLARYIREGTPWLEDEDSSSLKQEDIKSFYTSLWGTTRNISVPFSVTGSGRIARNIGEVFQAITARDIKERLTHTRHNTASGPDGIQRKHITGQDIKELLRILYNLILVSKIQPTAWNANRTILIPKQGKDGSRVENYRPLTIGSLICRTYWGIVDRMLRELIHFSPRQKGFVHETGCFNNIHILNETIKAGKNRNGLVAVQLDIAKAFDTLPHKAIEAALERLGLPSVARESIMNSYTNLSTNIEYAGLKTEVPLRRGVKQGDPLSPFVFNAIMDPLLDQLEQMKGFVINESHSLSALAFADDLILLSDTKDKAQRLLNHTESYLNALGMRIAAEKCASFEIRPTKESWYIINPDLSLTNGDKIPNSAADSSLSYLGGHISPWSGLHYKDLVDQLATTLERCRSARLKPHQKLSLTTSHLIPHFLHKTVMATPPISTIRAMDQTIRNHVKVVLHLPMGTPNGLLYCSKRDGGLGIPKLEALATSSALKQGTTLLNSLDPAIHALLQETKLEQRMQSLAKAMRLQWPILNFRVIDAYKKRMKTEELKAWSQLKVKGRGVQSFTEDRYGNAWLYNPNLLKPSRFLTALRMRGGMTSDKVTMNTVVPQSNVKCRKCRTCNETLAHVLGQCIYTKAQRIRRHDEIRDFVTKKLAAMKEGVKIIEEALIPTPTGNLKPDLVVVNQGRVHVVDVTVRHEDTGYLDEGHRSKVEKYTPLVEILAEQLQVERGRVLPLVVGTRGSLPKTTIDSLREININDRGSFITISLLALRNSIEIYHTFMDYNALVA

SEQ ID NO: 845 - protein, 915 aa, synthetic construct
MDNFDPAIPTDNDMNFDGISPAHRRRLRPHRAFDGNSPVHRRRLRPNRGPLPDDLSEDVDNAYRDATDALLSRATMEIILPLPFTSRSCESCLHQGKGDFILLNLNAALQHARSHHCGVRVLYSCNTCGKTYKGKHAAHCHVPKCRGPPAGQDKTVICGICNEAFKTQRGLSQHERLKHPVERNEKRERAMTDRPSQRPNRGYGKVWQKEELDTMIRLEKLLRGHPNIAMQMKEHFPNKTLKQIRDKRREPTYRALAELYDASQGHSATPELLEVICPSSDSETESRPVHTGLHISETEDEDTSDQGQFSRRLSPSSSRSGQASLAHRHLTEFERLPGLERPADDGLPPRREDADDREQQVNITPSKESGATDDLGSATMTEQEWRTGIIRQTLAEAPNGSTLSSKCRDLHSRLVSILTDISDGQLLATQALVDDVYARVLAQIESSQTTHASKRSRTRGPKTQSGRKRKWKRYRYARTQDLFRKNPNLLARYIREGTPWLEDEDSSSLKQEDIKSFYTSLWGTTRNISVPFSVTGSGRIARNIGEVFQAITARDIKERLTHTRHNTASGPDGIQRKHITGQDIKELLRILYNLILVSKIQPTAWNANRTILIPKQGKDGSRVENYRPLTIGSLICRTYWGIVDRMLRELIHFSPRQKGFVHETGCFNNIHILNETIKAGKNRNGLVAVQLDIAKAFDTLPHKAIEAALERLGLPSVARESIMNSYTNLSTNIEYAGLKTEVPLRRGVKQGDPLSPFVFNAIMDPLLDQLEQMKGFVINESHSLSALAFADDLILLSDTKDKAQRLLNHTESYLNALGMRIAAEKCASFEIRPTKESWYIINPDLCLTNGDKITNSAADSSLSYLGGHISPWSGLHYKDLVDQLATTLERCRSAHLKPHQKLSLTTSHHTADLKE

SEQ ID NO: 846 - protein, 1537 aa, synthetic construct
MTMNNVEDAPQVTSREAPTPREPHSWVASKGEVVSAYPLRNPWRCPVTGCKHVQVNGGGKSIETHAKSHGKSVGWSCSKCGSEKFKSYLAVACHHGKCGGRVTPKEHEFSCESCNRAFATAQGLGQHIRHAHPELNMDLRRARDGGGKTARSWSEEEVTLLLAEFPRASRKGRVAQLASEWGRSENSVRKAYAWYSAEALSPAPTTDANYDAAARGDQSEPEENRGEEVPPPSSCPEQVREESTGRVEQVEPGRRRGRTGKTANSKTGNAAAPLMQALGLVTLRGEPSEVSKRGGKQESVRSPYLLRSADLGSRSEEVSSGGGFQTLDKWLRPTSERRPLRQETPEHGQEPKQCTDPPNQSPRSMTDGGCSAPDGLERGGEQEERRRGGSESSGTFCGSEMASGGNGDGLPKRGTPCNEDVTLGPSNRGQVGSAVPVDQSTVSPSATAPLRENTPEVVHALVESNPPAQLGGTTETPFSGGDVEAPGSPGTGSPGGGKAQDSDTTVRRGNLEDGDVQVAMPPCGQQRTDGPKSGGEDGEPESEPIPPALGVQRSEGREYRKPEKRRPTEFESMRGMVQWIDDIAMKRRAHLKEVWGLVRTALEAVMENPESTDAYTAVDSATAAVQKALEEQSTGAATARSNPSRPRPRQNEQRRVPVQRQRKHAMRESKKRKEKRQAYRTAQVLFEKDRKLLYQRVQTESLLQPMGKSTCPIPPDTIHAEYKEIFGLNENYQEGCLSHFAKPVVDPDNPAKTAKLNNFQLVSPADVLDAWRALKPKAAPGPDGVRLSEIRKLDPGGEAFAILYTVWHVSKHVPVGIKECRTILLPKGGDPGVLKNWRPITIGSWVLRVYSRIVARNLERGTTLHQQQRGFLAGTNGCFENLWLWQKVMKACKSRKGALGCALLDVAKAFDSVAHKHVLEALERLSVPPHWVEVVKDLYTGVTTRFELGSARTEPITFLRGVKQGDPLSSFLFNACMDPLICELEANGRGPEFKGPQSASPVRINCLAFADDMGLFGDSSQGLQGSLDIADRFYGVTGMAVNASKSQCFLLESKGKTWKLEPFQFTIGGESIPSLGLMDTAKYLGLRCGPYGVKRELVDTVRDAILKLGKAPLKGLQRVALLKEQLLPKVLFALTVSMTRRSQLSRLDKEIRAAVKKWVHLPASVTSALLYLKVRHGGMGLMCLEQLVPRMQAAQLRKLAGGKLREQALALGVNEDAARLTSVKTAAESEQYWLAAYTNCLWQGVGAESFSNSPCSNTEVDPCSTRLDHKTYCHLLKMRTSTTPVNALMHRIRGVNKECRNCHSQPETLAHVLGECEFGAKDFRIVRHNRVVQSLKKMADEAGYLTVLEPTVVLANPADTGQLERLRPDLLVIEEGRSMAKRVQIVDVTVRFEGVYDGKSTLEFAAGQKIAKYDRIRPEVARMFETDPRNVEVLPFVLGSRGAVPSASLTFLKQLVGGGNAARAKGIAKGLSRSVIRSSCVILGIHMAKTRSNSRPTKSNEHSRLKHRSPQHRGSAAVESLCQTSEDVGGCPEGAVV

SEQ ID NO: 847 - protein, 1280 aa, synthetic construct
MWLAPTSSRISLAPKSKSNLSSQVNNADDEQESGRGGENRADVTSNQAGSTQCYSLYYPFGANGTCRYCHEMLGTSVANIESHLKSHSIQQYEYLCGTCKKSWPSWRSVMAHYSKSNCRHTTPITAIADEVKDSEVSSSIVVRKTEPKAAKNSGKTTKKQSKIVENPSVDPVIAKKTTTSSSSSIRSVVSKDSEHDDDQLHLATASIITSTRTTTAARVNSEETGRIKTTDEKKMFYCQHCAAEGWDTAASLSQHMRRMHLSEYNATIEVPMLKRRWTADETLVLAELEASIPTSEGVHVNQVLAEKFTSRSFEAIKSHRKRQEYRALVEQLRNRCTASFNLEGSTCTYNTNTSSTVDVNPVVNDSNCFDEDSRRIDPHDTQCSKAPSTTTATVRPVNVDDDDCPNIRQYLREQIIEGKVPVCHTMNRAVMHYVNNVPNADPVNEALRGIQETLASVHPPGEDHGGKPNAGSKLQSQRSKRRAQKFAHYQRLFKSDKSKLASEIFDHVDTSAIKPPLSEAHEHFRKIWETEAKDTDAVEQTETIGTDILLAPITREDIAWAIDQTRNDTAVGPDHVSLDQIRAIAKKELWCAFNIWLGQRKIPDLLKINRTALLPKGNEGLENVKNWRPITIASLLIRLYNKILTRRMQSVFHINRKQTGFKPMNGVGQNTSLLHNLLRHARTKRNSIFVCLLDVSKAFDSVPHDSIKRALRRNGCPTGLIDLISDQYENIYTRISYGKESSQEIFLRRGVKQGDPMSSILFNLVIDELFEIIGDRFGYAIDGVGSVNARAFADDIALISGSEIGMQQLLGSTEQFLLARGLELNVKKCVAICLRKAGKAKKSQIADSSVQNPPHFVVNNEPIRLLGVNDQCKYLGIQYTPLGAVDSRVPVSKLKLALASLSKAPLKPQQKVLMLRSYLIPRFIHTFTHTECYPKLMGQQDRLIRRWLKQTLRLPMSVSNEFFYLPIKEGGLGIGMLYDIIGAAKVRLHAMFGKSGDACLQYLVETQGSAMHARWCQAMKISYRPSTVDLNSRKNLVLEESRERFAKTVHGGGSEVFRASPITNQWLSGQTRLLKGSTYIRSIQMRTNTIPTRVTTSRGQDTIKTCRRCGLADETLIHILQTCPITQGMRCRRHNNVCRKVAEKLRSKGFQVFSEQGIPSPGLQTNISRPDLIAKRGDEALVLDITCVYESGSHSLQDAYRRKVSRYESLAETIKQHYQVQKVTFHGLCIGSRGAYDPRHLSTWHSLGFSGSELMLLAVAVMEDSLRTITLFNNANSLRI

SEQ ID NO: 848 - protein, 1268 aa, synthetic construct
MKSNTKHTSQVNNAGDTQGSAGIRKNSARTSNQVDLTRSYCVYYPLEINSICPDCPQLLGTNMTNIEKHLNSHGVTLLEFRCGVCRKQWPTWRSASLHYSKSSCRLTSTTSLPNITCTQGSLDVMQSQRKSVEKLSTKRSSSTTADDEESEAEESIVKQEKVDKRKSAGSNSTRRKNRSPSVSTKADAKEIDRSAADAKTTVHIGEASDDDGDQSTKESSTATGINVVDPKKTEKGEKYYCKLCAAKGWDTKVGLSQHMRHMHKSEYNASIEVPLKKRRWTQDEMIVLAELELEVTSSQTPCNSITLAKRFPSRTSEAIKLRRQSKEYKELLHQISLKRTAQICEESECTDASSDVDMITTVNGSIVEKDEDEADSRDRSLSTRLGADSTTCPDIRRYIQEKIIRGKVQMCTTMQDALMHYVADVCGSDPVLESLEGIREALTNVQPSQKHRDGKTNAGSKPRSAKAMRKAERYAHHQQLFKKDKTKLASEIFDGVDNSASKPPMSVAYEHYKKIWTVDTKDTGTLKSKASVGNDVLLAPITREEIALAIDNTKSNTAVGPDRLPMKDLKSIAKNELWGAYNIWLGLRRVPDPLKINRTVLLPKGKDSLDNIKNWRPITIASVLIRIYNKILAKRMQSVFHTNSRQTGFKPVNGVGQNVALLHNLLRHARTNKNNLFVSLLDVSKAFDSVPHESIKRALTRNGCPSEFIQIIENQYENSYTALSYTDGDSPLIPLKRGVKQGDPMSPILFNLVIDELFEIIGDRFAYELEGVGKVNARAFADDIALMSGSEVGMQQLLSETEEFLRARGLELNAEKCISIGLRKAGKAKKSQIADSSVKRSPVFTVKDKPLQLLAIDTLCRYLGVQFTPLGAVDSRVPVSALKSALESLKKAPLKPQQKVVLLRAYLIPRFIFAFTHTECYPKLMGQLDRLIRRWLKEILRLPASMCSEFFYLPIKEGGLGVGKLYDIVGIAKIRLHGSFHRANDECLRFLVETQGSAMHSRWCNAMKLSSRPSVTDINVRNVLTLDQSRTRLSETVHGLGSKVFRVSPITNQWLCGQTRVMKGNAYIRAIKMRTNTTPTRVSTSRGRDSIKTCRRCGLADETLSHILQTCPITQGMRCKRHNNVCRKVADKLRSKGFQVFSEQGIPSPGLRTNVSRPDIVAVRGDQALVLDVTCVFESDLGCLQKAYHQKVDRYKPLAETIKQIHKVRVVTFHGLCIGSRGAYDPGHLAIWHTIGFTGVELGMLAIGVIEDSLRTIALFNNANRLGV

SEQ ID NO: 849 - protein, 1276 aa, synthetic construct
MQLYTSLAVKSTTNHTHQVNNAGCTQESTGIRKNSAKISNQQDLTRSYCVYYPLGTNSICPECPNLLGQSLTNIEKHLNSHGISHLEFGCGICRRQWPSWRSVSMHYSRSNCRLTSTTSTPHITGTQGSPNVSHSQVKSVEKLSSRRSSSTTADDEESEAKEPIVRKKMVEIGSTEENSTGRKEKCTPSVNPRGDASNHIDRSIADASQHAHIGDISEDDGNPNDRERSTATGNIDVDPKKTGERHYCKLCASHGWGNKAGLSQHMRQKHKSEYNASITVPMIKRRWTLDEMVVLAELEATLTSSQGSCSSKDLAEQFPSRTQESIKLRRQLEQYQEVLRQVRLNRATQKGEESNCLGASSSNVHMVTVANDSINNEEDDDSDSRDRSPGTQLGTDSTACPSIQRYVQENIIRGKVKMCTTMQDALMHYVADVCGSDPVSESLEGIREALSSVQPSQKHRDGKTNVGSKPRSAKVMRKAERFAHYQQLFKKDKTKLASEIFDGVDNSAAKPPMSVAYEHYKKIWTVVTKDTGTLRSQASVGKDVLLAPITREEIALAIDHTKSNTAVGPDRLPLMDLKRIAKNELWGAYNIWMGLRRVPDPLKINRTVLLPKGKDNLDNIKNWRPITIASVLIRIYNKILARRMQSVFHTSSKQTGFKPVNGVGQNVALLHNLIRHARTNKRNMFVSLLDVSKAFDSVPHESIKRALTRNGCPSEFIQIIENQYENSYTALSYTDGDSPLIPLNRGVKQGDPMSSILFNLVIDELFEVIGDRFAYELEGVGKVNARAFADDIALVSGTEVGMQQLLSTTEEFLHARGLELNAEKCISIGLRKAGKAKKSQIVDSSVENPPVFTVKDKPLQLLAIDTLCRYLGVQFTPLGAVDPRVPVSALKAALESLKKAPLKPQQKVVMLRAYLIPRFIFAFTHTECYPKLMGQQDRLIRRWLKEILRLPASVCSEFFYLPLKEGGLGIGQFYDIVGIAKVRLHGTFHRANDECLRFLVETQGSAMHSRWCNAMKLSSRPSAVDLQTRNVLTLDQSRARLSETVHGIGSKVFRVSPITNQWLSGQTRIMKGNTYIRAIMMRTNTTPTRVSTSRGRDSIKTCRRCGLADETLSHILQTCPLTQGMRCKRHNNVCRKVADKLRSKGYQVYSEQGMPSPGLQTNISRPDLIAVRGDRALVLDVTCVFESELGCLQRAYHQKVDRYKPLAGTIKQKYSVQDVDFHGLCIGSRGAYDPGHLAVWHTIGFTGVELGTLAVGVIEDSLRTIALFNNANRLGI

SEQ ID NO: 850 - protein, 1173 aa, synthetic construct
MCVYYPLELNSVCSRCDESLGCEVANIEEHLKSHDIFKYEIKCGVCDKSWPSWRSVTAHYNRSKCRNTTPTISHATTTATTTTTVKEKASDREIDEEETGKRMTTTESLKVTTQEEKEEKKDEGLFYCKLCAAGGWNKQVSLSQHMRHMHAKEYNAAIEVPNIKRRWTKDEVQLLAELEASVPSDDGTSINQILSQRFPSRTFEAIKSQRKKSDYRDLVKRIRERGIIEESTCTDNSSMKIKSSSNFNLNNNPNPIVNDGNCFDIDEVDSNDCHQLNSLPTGSNDVEQYPDIRLYVRTNIMDGRVQLCDKMRLAMIDFVNIDSQNSDAVNMSLEGIHEALKMKKKKASNEDSHEDEKKKKNSLSGKLKNNKTKKKMQKYAHYQQLFKKNKSKLASEIFDSVDTSASKPPISDAYDHFRKVWEIKASDTATVDEIEPRGTNILLAPITREEIACVIEQTKNDTAVGPDELTLESLRCIARRELWCAYNIWIGLRHIPEQLKLNRTALLPKGNEGLEQIKNWRPITIASLLIRLYNKILAKRMQKVFQISHKQTGFKPLNGVGQNTALLHNILKHARANKNNLFVCLLDVSKAFDSVPHDSIKRALKRNGCPKEMIELVGEQYENITTTITYGKECSPAIELKRGVKQGDPMSSILFNLVIDELFEIVGDRFGYEISGVGSVNARAFADDLALISGTEIGMQELLSQTEKFLSCRGLELNVKKCVAICLRKAGKAKKSQIADSSVKNPPSFTVNNEPIRLLGVKEQCKYLGIQYTPLGAVDPRESVSKLRLALTSLLKAPLKPQQKVVMLRTYLIPRFIHTFTYTECYPKLLSQQDRLIRRQLKSILKLPASLSSDFFYLPFKEGGLGIGKLYDIVGFAKIRLYNMFARSGDMCLKYLTETQGSSMHARWCQAMGLSHRPPMTEVNQRKIVVRDEGRDRFIQTVHGSGHEVFKSSPITNQWLSGQTKIMRGSTYIRCIQMRTNTIATRVSTTRGRNSIKTCRRCGLADETLIHILQTCPITQGTRCQRHNNVCRKVAEKLRSKGFQVFSEQGIPSPGLETNISRPDLIAIRGDHGLVLDVTCVFETGKHSLTEAYRRKVTRYESLAETIKVKYRITTVEFHGLCIGSRGAIEPRHLSIWHSIGFSTTELGVLAVSVMEDSLRTITLFNNANKLRL

SEQ ID NO: 851 - protein, 1249 aa, synthetic construct
MHYSLATKRKHIFPSQVNNADDEQESGRGGGNRAELTSNQQVSSESYCLYYPFEANGTCRYCPEMLGTNATNIEKHLMSHGIQQYEYQCGVCKKSWPSWRSVITHYSKSNCRHNTSITSSTQVTDTEVSSNIVVRKTETTTTTKTKATGRKRKKSEIVDNPSSGAEVAENPAKNSDVSKDTENDDDHLHTASNIDTTSSAVVNSEETGRIKTTDEKKLFYCNHCAAGGWDTSAGLSQHMRHRHMSEYNATIEVPMIKRRWTKDEALVLAELEASIPSSDGTFVNQVLAERFPSRTYEAIKSHRKNQQYKDLVHQIRNRYAATCNLEGSNCTNMSSVVNIDPVVNDSNCLIEDSQTDPHDSTQIAQTMINVDICPNIRQYIRQHIINGKVQLCDTMNQAMLHYVNDVPDADPVNEALQGIQETLAGVHPSGGDQGGKQNAGSKLKSPTAKRKAQKFAHYQRLFKSDKSKLASEIFDSVDTSATKPPLSDAHEHFRKIWETKAKDNGTVQETRTIGTDILLAPITREEIALAIDQTKKDTAVGPDHVSLEHVRGIARRELWCAFNIWLGLRKIPDLLKINRTALLPKGNEGLENIKNWRPITIASLLIRLYNKILTRRMQSVFHISRKQTGFKPINGVGQNTSLLHNLLRHARTKKNNLFVCLLDVSKAFDSVPHGSIKRALKRNGCPTELIDLISDQYENIYTRITYGKESSPEIVINRGVKQGDPMSSILFNLVIDELFEIIGDRFGYEIEGVGSVNARAFADDIALISGSEIGMQQLLLTTEEFLSARGLEINVKKCVGICLRKAGKAKKSQIADSSVHNPPVFMVNNEPIRLLGVNEQCRYLGIHYTPLGAVDPRVSVSKLKLALESLSKAPLKPQQKVLMLRTYLIPRFIHTFTYTECYPKLMGQQDRLIRRWLKHTLRLPPSVSSDFFYLPIKEGGLGIGKLYDIIGAAKVRLHAMFSKSGDTCLQFLVETQGSAMHARWCQAMKLSYRPSAADIASRKNLVIDECRERFSNTVHGGGSEVFRASPMTNQWLTGYTRLLKGNTYIRSIQMRTNTIPTRVSTSRGRDSIKTCRRCGLADETLIHILQTCPITHGMRCQRHNNVCRKVAEKLRSKGFQVFSEQGIPSPGLQTNISRPDLIAKRDDEILVLDVTCVYETSKHSLQDAYRRKVDRYKPLAETIKQLYQVQNVAFHGLCIGSRGAYDPKHLSTWHSLGFSGRELGLLAVGVMEDSLRTITLFNNANGLRI

SEQ ID NO: 852 - protein, 1219 aa, synthetic construct
MKSKKNSQSQVNNADDEQESGNAGKDRAGVRSKQLDCSQSYCLYYPFEMNSTCQICNDFLGTTSSNIEKHLKSHGIDKYDYKCGACNKSWPSWRSAMTHYSKSNCRLRGTSTTTSKDTHTTTTSAAATAKTTTTMVHTSSQQVTVEVLSQDGEPKADDETSSNVSSQAKEEPKLLYCRLCASGGWTKSVSLSQHMRRMHPTEYNASIEVPTVKRRWTDDETQILAQLEASIPPSDGLFMNQMLASKFPSRTFEAIKSHRKKEDYRALVEQFRTQMSVVSENERSNCIYNDNNEDQLSHVNTNPNPNPNPNTNNNGFDGDDDLPVVQTIATAATTTTTINVEEYPDIRRYLKTHVIDGKVQLCNTMKEALIEYVNNIPHTDPVNKSHSGICEMIKDVPRNPKDPSVKTNDKGRRKGEKSKKKAQQYAHCQRLFRTDKSKLASELFDNVDTTAKKPPLSDAYEHFRQIWETDAFDKGAVEQGNDIGTDILLAPITREDIQLAISQTKSDTAVGPDRISLDQIRSTSKNELWCAFNIWLGSRRIPSTLKINRTALLPKTNEGLENIKNWRPITIASLLIRLYNKILARRMQLVFRTSQKQTGFKPMNGVGQNTSLLHNLLRHARTNKNNLYACLLDVSKAFDSIPHDSIKRALIRNGCPPDFVNLVSDQYNQTYTRITYGSENSKEILLKRGVKQGDPMSSILFNIVIDELFQIIGERFGYEIEGVGSVNARAFADDIALISGTEIGMKELLTITETFLSNRGLEINVKKCVAICLRKAGKMKKSQVADSTVKNPPILTVNNEPIRLLGINEQCKYLGIHYTPLGAVDPKTAVIKLRSSLASLSKAPLKPQQKVLMLRIYLIPRFIHSFTYTECYPKLMGQQDRLVRRWLKQILKLPASISTDFFYLPIKEGGLGIAKFHDVIGTAKLRLHGMLTNSGDVCLRYLVETQSSAMHARWCQTMGLPYRPSSIEVNSRQKILLDESRSRYAQTVHGGGYDVFRVSPITNRWLSGYTKIMRGSTYIRCIQMRTNTIPTRVTTTRGQQTLKTCRRCGLADETLIHILQTCPITQGMRCTRHNNVCRMVADKLCSKGYNVHAEQGIPSPGLQTNISRPDLIAIKNDEALVLDVTCVYETSKSSLHDAYRRKIDRYAPLSDTIKQKFKVNHVSFYGLCVGSRGAYDPKHLSIWHSLGFSGNELMVIALRVMENSLRTIKLFNNANRLCI

SEQ ID NO: 853 - protein, 1247 aa, synthetic construct
MENRKNSAVTSKQQNQMKSYCLYYPLDANSTCQDCNDLLGVSVANIEKHLNSHNIKKFEYRCGVCDKLWPSWRSVTTHYSKSSCRNQTSTAPSSSTNTMQKFSNSIIDRKESEVTKANSKESGIVTVVDEESETDDEDSSVLQQQTNENIQKHRYSSSVIPKNNRKESDSESNLEEDDGDDENETSESIGTQHSAIGVGLKKTGKIKKTIDKINNKYYCELCAAGGWDKSVSLSQHMRHMHKSEYNASIEVPMKKRRWARDEILILAELEAKIPSTDGIFINQILAKKFPSRTLESIKSRRKTKEYRDLLQQLRDCQAATSPEGLECIYESSIVDSSTVENDSINDKEEEDNENNPDNTIISVLGTDSTTYPNVQQFIKDKIIDGRVPMCTTMADALAHYVNHTMNSDPVEESLKGIREALGNVHSSQPHRDEKRDAGSKFRSVKSKKKAHEFAHYQRLFKKDKSKLASEIFDGVDNSAIKPPMSVAYEHFRKIWEADTKDTGKLENKVSVGADVLLAPITREEIAWAIDNTKNDTAVGPDHVPLKDIRRIARNELWCAYNIWIGSRRVPNELKANRTVLLPKGKDDLGNIKNWRPITIASILLRLYNKILACRMQSVFRTSSKQTGFKPVNGVGQNVAILHNLLRHARANKNNLFVCLLDVSKAFDSVPHESIIRALARNGCPNEFIDLIKNEYENSYTALSCTDGDSPLVYIKRGVKQGDPMSSILFNLVIDELFEIIGDRFGYELQGVGKVNARAFADDIALISGSEQGMQQLLLETEKFLNARGLELNVDKCIGIGLRKAGKVKKSQVADLSVKNPPSFMVKNKPIRLLGINEQCRYLGVQFTPFGAVDPRAPVAKLKLALESLKKAPLKPQQKVLMLRSYLIPRFIFSFTHTECYPKLIGQQDRLIRRWLKEILRLPSSICSEFFYLPIKEGGLGVGKLYDTIGLAKVRLHGSFTRSGDQCLQFLMETQGSSMHSRWCNAMKLSTRPSAIEINQSKVLFIDESRVRLSETVHGSGSELFRNSPITNQWLSGDTRIIKGRTFIKAIQMRTNTIPTLVSTTRGRDTNKTCRRCSLADETLVHILQTCPITQGMRCQRHNNVCRKVSEKLRSKGFQVFQEQGIPSPQLQTNVSRPDLIAIRGDQALVLDVTCVFESNKNSLQDAYRRKVDRYKPLAETIKEKYKVRDVEFHGLCIGSRGAYDPRHLAIWHSIGFSGAELALLAVGVIEDSLRTITLFNNANSLRI

SEQ ID NO: 854 - protein, 946 aa, synthetic construct
MCMDKNWKTRMKGMKLPKNVTPGIKVPWKKSKCALCEQVLSTAKEAMIHLKMVHKAHKILYVCKSCAGAKKSLGQTISHASKCRKPKIGKAQKQKPHNCPICDRGFGSSSGLAIHKLRIHAARMQMDMSNIHGNNRPDYLTDPSSLLELISCPDKIPSNCETPSLGLKALDNFGSVPRVVKRRRDLRSDVCSHPNRGVAAEARNTPTVRPPPRGSKVSPDPSYLGRREDSLALHDSTSLMSGVSGAGDTLTDGLGNTGVKEGAPLGMRSWRDSRTRGSSSHLCGGVPSGRDTPAGFSFPKGLKALPMVPNDGAPSGRSGWRDSRVLPRSHPKREVTGSARDTPTRRSVLEGLKTTLVPSMGCVRKLQIQHDSMPPRGSVSGVGNPRTLVPEGVKPNVVPTSRKRRRDLRAGKNPGHSHGRASDSRNTPTATLVNKGLNAPSMTLSLLRKEDHTKTVSVLPVSNFNEELLFLYKNEDPRGRDLVSEKGKFKKSLRFYTVPGVETRSAKNIKKLLKNLATFKGRNAGRAAVKPKGIWNPPTSLHTRAKYRLAQMYYESSLKELAIGILDDKTKILCPISAKDISTEYKRIWESSDEFKSLGSFSKRPKAVNKLLRGPITPGEVLFTVKAFKPNTAPGPDKLGKNDLLSWDPKARIFNEFLIRGKIPGSLKVSRTVLLPKGSGSFEKNEIKNWRPISIGSVVLKTFMAIISKRLQCACDLHPRQRGFIQSPGCAENLTVLKELMERAKKNKNTLAVVFIDFAKAFDSVSHKHIDEVLKQRNVNMALRKIIKDSYNHCYTKVETSEGATAKIEIKKGAKQGDPLSPLPFCLALDPLVATLDELGDGAEWDNCTGAKVSVMAYADDIILLSDSIKGIKKNMEILSIFSDLTGLRVNPTKCKGLLIVKGFPRIVKEGWTINGEEIEMLGPTGRTKYLGVHVNPWAGLMKPPT

SEQ ID NO: 855 - protein, 1340 aa, synthetic construct
MKGKKLPNIVSVGIKVPWTRSNCLLCKLDLSTAKEAAIHFKKVHKAKWVLYICKSCAGTKKSLGQTIAHASKCVKPKSKKDIKQKEHSCPICERKFGSAGGLTIHKLRIHASGPEIKTGSVNQTNYLDRIINPYAWSDAEPISNAASAGTDTPILGIKAVPRFGSAPRVEGRRRDSRANIRPHSIRRAAMEARDTPTASPPIRGLKVMLDPPHLGRREDSLTLHDSTPIVGGVSGVGDTLTDGPVGINGNSVTPSGDRCLSLSQVCGDPPQLLGGASGAGDDLDGPYSSAGLKALLSVSVGRAPLEPRRWRDSRALLRSHPIRGVAGGSRDTPVPPPVTRGLKTTMAPSSGYVGKPQTHPDSKFPSSCVSGAVVSHVLSLGDKESLVVPSMRIRGRAPRSQSRPNRHRGRVPGACGVPAGALLSEGSNALPAMSSSGSGGGNGRTVSAPPVSEMNGELSFLYNNVAPNNRGVISEKGMFRKSRRFYITPGVEPRSVMCTRTLLKHLATFKKRNAGGAAVKPKGIWNPPLSIRDRAKYRLTQMYFEQSLNELAIGILDDKSRILCPISPSNIHIEYRKIWESIDEFRGLGSFAKRPRAINKLIRGPITPGEVLTTIKSFKPNTAPGPDKLGKNHLLSWDPKGKKLARIFNEFLVRGKIPESLKLSRTVLLPKGSGSFDQHDSKNWRPISIGSVVLKTLMSILSKRIQGACELHPRQRGFIQSPGCAENLTVLKEIIDRAKRNRDTLAVVFIDFAKAFDSVSHKHIDEVLKRRRVDMVIRKIIKNSYKHCYTRIETSGRTTAKIAIKKGVKQGDPLSPILFCLAIDPLVATLDEMGEGVQWNSSTGEKVSVLAYADDIVLLSDSIKGINKNMEILSIFSNLTGLRVNPKKCKGLLILKGFPCITKDEWKINGEKIEMLGHTGRAKYLGVQVNPKAGLVKPPIREQLNLMLEKISKAPLKPTQRLGILKQHVIPRVIFEADHCMISKTILEDCDRDIRTRVKTWFHLCHSVSNGLLYCRAKDGGLSIPRLKTAVPATQSKRLIGLMKSDDPLIKEMAGSETNRRKVANMIKELTKNPDDPKPENLESFDTVNIDTNHRKDREFETWCKQNHHGRGVAPFKGDKVSNCWCNNPVEERFSQKEFILALKLRSNSIPVRARVGNSFNGDKSCRWCRHGPETMEHALGSCKTWRDVRMKRHNRICCALASLLLRHGWRVDSEKKITLQENGHYGKPDIIATRGSKALVIDVAVPLKGDVLTLRTTAKHKEEKYKIFENAIKGTYTEVKEVTYWGYPISAKGKWYKGNNILLREIGIKSLRSVNSVARCHVKLALWGTINLCKCFFRN

SEQ ID NO: 856 - protein, 1474 aa, synthetic construct
MGGIYLFQNKLSRTTFVSHTNERFMGLAGTEVTLVYIRYPCLIQVFCCCINRMNSIDKISWSSPRSSLRWSSKLLLRGRLFSGNRDKEKATKTDNSVISTPQRSQRTAIPRKDLFLVKPPIESLFLCINKNWKKLMKGKKLPNIVSVGIRVPWTRSNCLLCKLDLSTAKEAEIHFKKVHKAKWILYICKSCAGTKKSLGQTIAHASKCVKPKTRKDTKQKEYSCPICERKFGSAGGLTIHKLRIHASGPENKTGSINQANYLDRIIDPYAWSDAEPISNTASVGTDTPTLGIKAVHRFGSAPRVEGRRRDSRANIRPHPIRGAAMEARDTPTASPPLRGLKVMLDPPHLGRREDSLTLHDSTPIVGGVSGVGDTLTDGLVGINGNSVTPSGDRCLSLSQVCGDPPQLLGRASGAGDDLDGPYSPAGSKALLSISVGRAPLEPRGWRDSRALLRSHPIQGVARGSRDTPVPPPVTKGLKSTLAPSSGYVGKPQNQPDLELTSSCTSGVVVSHVLSLGDKESFVVPSRGIRRKAPRSQSKPNRHHGRVPGACDVPANALSEGLNALPAKSSSGSGGGNGRTVSAPPVSNMNEELSFLYNDVSPNNRGVVSEKGMFKKSRRFYITPGVEPRSAKCTRTLLKHLTTFAKRNAGGAAVKPKGIWNPPLSIRDRAKYRLTQMYFEQSLNELAIGILDDKSRVLCPISPSDIHIEYKKIWESTDEFKSLGSFAKRPRAINKLIRGPITPGEVLTTIKSFKPNTALGPDKLGKNHLLSWDPKGNKLARIFNEFLVRGKIPESLKISRTVLLPKGSGSFDQHDSKNWRPISIGSVVLKTLMSILSKRIQGACELHPRQRGFIQSPGCAENLTVLKEIIDRAKRNRDTLAVVFIDFAKAFDSVSHKHIDEVLKRRRVDMVIRKIIKNSYKHCYTRIETSGKITAKIAIKKGVKQGDPLSPLLFCLAIDPLVATLDELGEGVQWNSSTGEKVSVLAYADDIVLLSDSIKGINKNMEILSIFSNLTGLKVNPKKCKGLLIIKGFPCVSKDEWKINGERIEMLGHTGRAKYLGVQVNPKVGLIKPPIREQLNSMLDKISKAPLKPTQRLGILKQHVIPRVIFEADHCMISKTILEDCDRDIRTRVKTWFHLCHSVSNGLLYCRAKDGGLSIPRLKTAVPATQSKRLIGLMKSDDPLIKEMAGSEINRKKVANMIKELTRNPDCPKPENVESFDTVNIDTNHRKDREFETWCKQNHHGRGVAPFKGDKVSNCWCNNPVEEGFSQKEFILALKLRSNSIPVRARVGNSFNGDKSCRWCRHGPETMEHALGSCKTWRNVRMKRHNRICCALASLLLRHGWRVDSEKRITLQESGHYGKPDIIATRGSKALVIDVAVPLKGDVLTLRTTAKHKEEKYKIFENAIKGTYTEVKEVTYWGYPISAKGKWYKGNNVLLREIGIKSLRSVNSVARCHVKLTLWGTINLCKCFFRN

SEQ ID NO: 857 - protein, 1365 aa, synthetic construct
MFSRIIVGNCFKDKPAKFETTTKTTPQRSQRTVVPRKDLFSVNPKNECLFLCIYKKWEDKMKGKKLPGYVTVGIKIPWVVSECILCKVSLASAKAAAVHFKKVHKARKLIYICKNCSVTKENLGQTISHAPKCKMPKKRAPGPGPCVCSICERSFGSVRGLSLHKLRAHITRRKPSAIDEKSKLTPILGIAPLVGGTRRDLRVVVRSHPYGGVTSGARNTPTMSLSAGGLKVIPGPSLLGRREDSPSLHDSTLVISGVSGGGDTLTDGSRGTQAPGMAPSRERRRRDLRVHRSWIHRCGETLGTRNTPAESFSPDGKKALSLVLSGGVPRMVTDREDSRVIVCPYPHGGVAVVARDTPPFGITVQGPKVTLDFPPEPVEKWTQHDSTPNQSGVSGAHDFTTEVLGGVNKSCVAPSGGTNYRDSRSYEHPQHVYGGGRGDRDTPMVAPPLEGLKATPATLPLDQYGDSSTRTDNALPIPGVQNNLLFLYDEKVPHSGEKKQLAKWRESLRFYTTDNVEPKSSNCVRVLLQKLQAFKERRKRGAVRKPKGIWNPSPSISARAKYRLTQMYFEYSLKELAIGILDNAERMLCPIPIKVIWKEYKKIWEAQDMFKTLGNFATRPEAKNLLLRGPITPEEVIGTVKAFKPNTSPGPDKLGKVDLLAWDPRGMKLTHVFNYFLTCGKIPKSLKLSRTVLLPKGSELFNKSEIKNWRPISIGSVVLKTFMAILSKRLQDACELHPRQRGFIQSPGCAENLTILKELIERAKRNRNTLAVVFIDFAKAFDSVSHKHIDEVLKQRRVDAVIRRVIMDSYKHCYTTVEAAEGSTEKVQIKKGVKQGDPLSPLLFCLALDPLIATMEELGEGYTWDENLGHKVAVMAYADDIVLLSDSVKGITKNLAILSIFSDITGLRVNPAKCKGFLIKKGYPCIVNEKWKISGDEMEMLGPTGKVKYLGVQVNPWTGFVKPPIRESLKEMLEKISKAPLKPTQRLDILKTHVIPRILYNADHCMVSKTVLDDCDRDIRTQVKAWFHLSPAVSNGLLYSRAKDGGLGVARLAALVPATQSKRLIGLMKADDLLIKKMAGSDTNRKKVTNMLRRLTCNSEYPSNGDLETFDLKKVGPDKRKDSEFQAWCRQRHHARDVVNFKGDNISNCWCSNPVKEGFSQKEFILALKLRSNSIPVRARVSDSSAGDKTCRWCCMGPETLEHILGGCKVWKKTRMKRHNRICNALVVLLSRHGWRVDTERKITIQENGKIGRPDIIAVKDKRALVLDVAIPLKGDDETLESMAGKKVEKYEVFDKVIKDMYKDITDVTYWGYPISAKGKWFKKNAALLRAVGVKSTRTIKCIARCHVKLALWGTINLCKGFFRK

SEQ ID NO: 858 - protein, 1034 aa, synthetic construct
MVFFSIEKDWRSRVNTGALPPDVSVGLKVPWPTQDCSLCPVTIPTAGTAMKHMKIRHRASKVSFICARCSGISPSFRQVVTHAPKCGLHKQYKSATINLFRCEHCTKSFTTKRGLSLHRRRAHLAVYLSSIDSQPAVSTPPGMPNLEDLQLLGNMLPPVEACSGAAVALMKAFGEEKFLPFSPWKMTPRQINIMTGRVVATLKRRNPRLAGGVAAFKLKRLSYPVSSSSRYRLTQIRMESAISGLAKSILDVAPRVPCPVSPEEVLIEYKGIWGASDSFKGLGQFGDCPQADNSVFHTPFLPDEVLTIINRMRPETASGPDGLGKNDLLRWDPRGTKLVKLMNTILFSGSVPNILKRSWTALIPKGGPSFNPTNLKCWRPITIGSVLLKIFSGALTRRLEAACPLHPRQRGFIKAPGCAENLLVMRGLMSASKRHALTLAVIFIDLTKAFDSVSHSHIAAVLERREVDILIRRLIADLYRGCFSTIRTGGGFTPWIRLRAGVKQGDPMSPLLFNLALDPLIRKLESLGTGFSLPGGQSLTSMAYADDLVLLSDSWGGMERNIRILETFLDLTSLKVNHKKCNGFIMEKGRPRFDDKAWKISGLPINMMGPAGAATYLGVEVNPWRGFLKPDINGVISKMLQRISGSAVKPTQKLRILRGFALPRVLYVADHCLVSKSVLMECDRLVRTAVRAWLHLHPTVANGLLYCSNNDGGLGLQRLSTLVPSIQIRRQIRMLRSDDEITQAVAMISINKKMLVQSIEALLGEPDSLNPVSLDEFDLKLISSKALKALEHEKWCHHLSHGRYARHFRNDKISNCWIRDPVKSGFTQADFIVSLKLRSHSLLHGGPLAQGTQAPPCGMCNSEFNTLGHILSCCPAWRPQRMQRHNNVCTALIFALLWKGWSVDREQRICLIRTKEQWVPDIIAKKGDCALIIDVAIPLSGSLESLKQAANEKVLKYKKLERLVKGSYKVETVSTWGFTIGALGKWYPRNKELLKKCGIISAKTIKGIARRCVKLALWGSINICKVAFREANMC

SEQ ID NO: 859 - protein, 1095 aa, synthetic construct
MAGLIRLGTIKNLKSRLLITPNFDTPSHPKKQGDPATPLRGRMRRIPRRRLFSKRTDPGMLFFCVNKKWRSNFKNKMLPSEVMVGLRIPWMNQKCKLCPARISSLREAMRHMRMCHKAKKLIFLCFTCAGYRCSMRQSIAHASKCKKSYETITSPKGNFNCSHCSKTFKSQRGLSQHRRRMHLSTYLNSPTRDQEAHTPMSGDSGVIINALSGTTIPQMDVVSGLKTSLMMAMKKDEFKHVAPKRMSYGSLSKKVSRMIISIQELNGIIPRGATTKNPFNRGTSSGRAKAKFRRTQNHFASSMKDLASEILDGAIRLPCGIPKDTIWRAYKDIWETPDKFVGLGAFGSCPKADNSQFELPILPEDVLMILKAMKPKSAPGPDGIGKLDILRWDPTGIKLAKLFNTMLLKGKIPSSLKKSRTVLIPKGGPSFDESLLIHWRPITLSSVILKTFSGLITKRLSEACKLHPRQRGFIQTPGCAENISTLNGLILKAKKDKRSLAVVFIDFAKAFDSVSHTHIDSVLRQRGVDRLIRGLVKNSYKRCYSAVQTSEGLTPEIALNRGVKQGDPMSPILFDLALDPLISSLELHGMGISITSDVSITTMAYADDLVLLSDSHGGMSYNISILEKFSRDTGLEINPSKCMGFMIKNGRAILNFDKWKIFGHDVENASPTRHAKYLGVQFNPWKGIVKPQIKSQVKEMLRKISEAPLKPTQKLDILRSYAIPRIVYVADHSMIPKSSLDECDREIRTCVRSWFHLHPSVVNGLLYCAYEDGGLGIQRLGTTIPAIQARRQIKLLSSEDPVTRSVTEATVNMDSISKSIRRLCGVVCAPSLRSLRMFDLEKISAKAMKTFEFQHWCKAGIHGKEAGPLRKDKISNCWLRSPISEGFTQSDFILSLKIRSNSIPVKASVMTGKTPNTICRGCLSHPETLDHVLNVCKTWKLKRMKRHNRICNLLSSVLRSLGWKVDQERRIYLDDGRQGVPDLVAVKNNTAVIIDVTVPLNNDDKTLSKCDRAKICKYSPFTIAIERKYPEVTSVTVWGFPVSAKGKWYTPNAKLLTHIGIKSKQRMKSIARCCVKLALWGSVNICKEFLKIKNM

SEQ ID NO: 860 - protein, 1260 aa, synthetic construct
MEKSNLYFYTGLALDRVNNAPAVGFDAPADSVKYIRGVIRVAGPMDKMVWTIMKSHENESENQVLPVEHGEEVEENVCDDHGEEILSILPMVFTRDTFNDLTMDSFNPDFKYLSTFDDPYVRESGYLNAHLVNGSSLLNSFRPSTDFNRDRNKDLNSTGSNINILESSSWKDGFFYLEYPVDSFNCPICPQILPTFGKWAKHINVVHKSKAIRVVCSKCGKSSQYHNIACHYPKCIPKKVDTPMKSHTCSVCGLGFHTRSGLSQHCRHRHPAVRNEQRKEDMAAKSKIKEGSTRSRIWTKDEVAQLIQLERKYIGKRNINKCIESEMRTKTNKQISDKRRELAKKKLVVTGDREEVTEVEDIRVNILEIPPPRERIFPLKGHPEVDLVEKICKRGKQSREGREIINSLGEIEGLLKEDLTKALGWAMLEKLCYSLVEGKDPRNESQIELRNKGKGKMRKEGRRKQFNAIRRYATKKAKYKFYQQLFDKDRRRLTRIIMGEPDKAKCAIPMKEIEEYYVNILGTIGHGNMIGWPSTTENADNDILMSPISVDEIRIALREIRKDSAPGPDKVKVSNLWDIFNLDSLILTKIFNIWFLNRQVPDEFKKNRTILIPKTQDEEEMKKLTSWRPLTIGSVWIRIYTKILAKRLVETVKICSRQKGFISAPGCEENIAILDNLIKGAKRNGNEIAIVFVDLAKAFDSVGHGHIIAGLRRFGIDEHFIDIIRDLYDNCTTRVWVGDEATESILIRRGVKQGDPLSPILFNIAMDPLLTRLEVEGSGFYVKGNSVTSLAFADDVAILSSSYKGMIKNLGILEEFCKNTNLSVNVKKTKGFHILTKHKTYVINPKDNWQIESEEIEYVQPGDFEKYLGARIDPWIGVGGPVLKEKLKDWSENLIKAPLKPAQKILILQTYILPKLFYNLLLIEPPFNLLDDLDVLVRKIVKEILHLPQCTTDGIFYSRGRDGGLALTKFSVQIPNMLIRKWRRHIVSRDDWMDLSYLYAGENLVDKILSFSAVTSHPKKWREEEFLRWSELRCQGIGIKYFKNDLISNSIFRNSSKVKSSAYIAALQLRANIYPTRETLARGRGGVNALCRWCGKVRETVPHISGQCYKTKNARIKRHNRVVSAVVDKVGKLGWKAMIEPHLRNSKGELRKPDIIFIKGDTAVVVDVTVRWEDNAGSLEQAHSEKVAYYLELEEEIKNLTGGKNIHFFGFVLGARGKWSEGNNDLLQLLGMDRSKNFKESICRLVLYSTIGMMAIFSDR

SEQ ID NO: 861 - protein, 1260 aa, synthetic construct
MEKSNLYFYTGLALDRVNNAPAVGFDAPADSVKYIRGVIRVAGPMDKMVWTIMKSHEHESENQVLPVEHGEEVEENVCDDHGEEILSILPMVFTRDTFNDLTMDSFNPDFKYLSTFDDPYVRESGYLNAHLVNGSSLLNSFRPSTDFNRDRNKDLNSTGSNINILESSSWKDGVFYLEYPVDSFNCPICPQILPTFGKWAKHINVVHKSKAIRVVCSKCGKSSQYHNIACHYPKCIPKKADTPMKSHTCSVCGLGFHTRSGLSQHCRHRHPAVRYEQRKEDMAAKSKIKEGSTRSRIWTKDEVAQLIQLERKYIGKRNINKCIESEMRTKTNKQISDKRRELAKKKLVVTGDREEVTEVEDIRVNILEIPPPRERIFPLKGYPEVDLVEKICKRGKQSREGREIINSLGEIEGLLKEDLTKALGWAMLEKLCYSLVEGKDPRNESQIELRNKGKGKMRKEGRRKQFNAIRRYATKKAKYKFYQQLFDKDRRRLTRIIMGEPDKAKCAIPMKEIEEYYVNILGTIGHGNMIGWPSSTENVDNDILMSPISVDQIRIALREIRKDSAPGPDKVKVSNLWDIFNLDSLILTKIFNIWFLNRQVPDEFKKNRTILIPKTQDEEEMKKLTSWRPLTIGSVWIRIYTKILAKRLVETVKICSRQKGFISAPGCEENIAILDNLIKGAKRNGNEIAIVFVDLAKAFDSVGHGHIIAGLRRFGIDEHFIDIIRDLYDNCTTRVWVGDEATESILIRRGVKQGDLLSPILFNIAMDPLLTRLEVEGSGFYVKGNSVTSLAFADDVAILSSSYKGMIKNLGILEEFCKNTNLSVNVKKTKGFHILTKHKTYVVNPKDNWQIGSEEIEYVQPGDFEKYLGARIDPWIGVGGPVLKEKLKDWSENLIKAPLKPAPKILILQTYILPKLFYNLLLIEPPFNLLDDLDVLVRKIVKEILHLPQCTTDGIFYSRGRDGGLALTKFSVQIPNMLIRKWRRHIVSRDDWMDLSYLYAGENLVDKILSFSAVTSHPKKWREEEFLRWSELRCQGIGIKYFKNDLISNSIFRNSSKVKSSAYIAALQLRANIYPTRETLARGRGGVNALCRWCGKVRETVPHISGQCYKTKNARIKRHNRVVSAVVDKVGKLGWKAMIEPHLRNSKGELRKPDIIFIKGDTAVVVDVIVRWEDNAGSLEQAHSEKVAYYLELEEEIKNLTGGKNIHFFGFVLGARGKWSEGNNDLLQLLGMDRSKNFKESICRLVLYSTIGMMAIFSDR

SEQ ID NO: 862 - protein, 1155 aa, synthetic construct
MSKPTGRLLNRRWSPRGDQTPGTPRGPRFLARVKRALFTPSKDKAGMTFLCANKTWRQNMSQGRLPKMVKVGLRVPWASQSCRLCDIELGSLREARTHLIRIHRPWKVFYRCSRCAGTFAHLPSVVCHVPKCTPRQTTTPADPGHYRCDLCTKVFSSSRGYSNHRRSKHTAAYLREKQGSQLKERNGNSHWSKEDTASPRQMIDEEGNSPGLYAKAAARFPTMTPRQIREKCRLIRASAKTSVVKSPTTHNANQDLRDLEVELPPQPSVAVLKEALEAQLTGGEGDEGLDPLHCSGRDLNRYVRKVIRLLCRQTPKVLGGKIKRTSPGNPKRLKQSKRFRYKIMQTRYRRDRPTLARWILDGKEKSECPISRAEVASGYKRIWEAGDSFKGLGGFAAMPPADNSPLCVPISAEEALRAVRRMDPKGAPGPDGLRRSDLLRWDNKGRKLANLFNTILHKGKLPSCLKRSRTTLIPKSSDSAKLADLSQWRPITIGSVMLRAFSGILARRLKEACPVHTRQRGFIESPGCSENLLLMDGLLRIAKKEVRPLAVVFVDFAKAFDSVSHQHIAEVLTRKGVDEWMRKLIQDSYKGCTTVVRTKHGETDRIHIKVGVKQGDPLSPLLFNLALDPLLYVLENKGVGFRVGGRSLTALAFADDLVLLSDSWKGMERNLQILEIFSSLTGLKVNPSKCHGFMLDKSQRRYTINDCEVWKLAGTPIHMVPGHEAVTYLGVQISPAKGILTPPLRTLVKDMVARITRAELKPSQKVEILRTYALPRLIYMADHGMACGSLLDGCDRDIRSAVKGWLHLEPHTTDGVCYASFQDGGLGLIKLAAHIPTVQLRRIMAMYNSTDECTKSVARATLPVSNIWALWNRVRGIKRSGDHSRPDLNAIDLKEASTAAWRGREFGRWCKLKTQGVGIEVFRADKISNSWLREPTGARFHESEMIMGLQLRTCTFPTLSSRARGRGRAHDALLCRLCGRQQETIRHIIGNCVSVKPNRMANHNKICGFLQRVAEEAGWLVARERRLVSDSGSVGVPDLVMVKGREAIILDVAICFEANQDTLYDSEVRKIKKYSGFTMAVKTIHPDVRNVSVCGFPMGARGKWHKNNTAILTKLGVSKKRAKQLAVVMSRRALLQTVDMCKVFRALARRQRVPR

SEQ ID NO: 863 - protein, 1180 aa, synthetic construct
MFSTPRRRLSRPRVVRSADGDSDQTVVGTVTSRGIRGRFLFTKDKDGGSPGTPRKAGVRMIAGKRLFPRLKNPSVIFMSWDKAWLSKLKNKILPSSVIVGLRVPWIVQDCPMCRISLGAVRETLQHMKKTHKARTTLMVCRVCATTFKTPHKAVCHAAKCGLAGSKAKAPSAHACDLCTRSFSSKRGLSLHQRVKHLDTYLRRLNAVPPAKTPRSVWSASDISTLISIQRNTPRGSGFVKDVAAALPHLTENQIRNKWRQIKSQAQQEEAVAPAAELEEFLGKLGTEMALEETVSVAKAHLRKKIVPNSKMGMSFLRRSVVSLNNFLWKLVRSWRGRKLTPLAGRKVRLSGLSSQFKNPAKRMSFKYVQTTYYSDRKAVAQFILDGRERSLCGIDPQAVTRTYMGIWEKEDEYVGLGQFARLPKADNIPFLFPITPDETLRTVRRMDQNKAAGPDGVRRNNLLVWDKKGEKLADLFNAMLLSGRIPSCLKQSRTTLIPKSSDPTKANEINQWRPITVGSVILKAFSRILTLRLEDACPIHPRQRGFTEAPGCSENLIILENLIKLHKSKKKSLAVLFIDLSKAFDTVSHRHIGDVLRARGVDKLIRRIIRDSYAGCTTKIVTAGGLTRAINLKVGVKQGDPMSPLLFNLALDPLLHTLENAGSGAEVEGRNLTALAFADDLVILSNSWDGMNRNLGILGRFSDLTGLKVNPGKCHGFLIGKGAAKRYTLIGCQPWVLGGEPIHMVGTQESVRYLGVQIHPLKGILVPPIRESIRDMADKISLAALKPSQKVDLFKTFALPRITYVADHGNANISLLRECDRDIRTVVKKWLHVEPFTTDGVLYSRCKDGGLGISRLASSIPAIQLKRLLSLYNSTDECTQAISRAVFPQKRLTQLWKYVWPEKVALGQKCDLDLGNNAGCKIDSRAWRQAEFERWCRLTLQGMGVAVFKNDKISNKWVLETRTGGLTESEIIMAIQLRTNTLPTLSVLRRGTAQGDRLDCRLCGVGKETPFHVVSCCNKLKDIRMANHNKICAFLRKESESLKWVVLSEKRLTTDEGRVGVPDLILTKDNKALVIDVTICFERDITTLENACDGKVRKYSVFKKAVSDLLPGVRKVECFGFPMGARGKWYEGNSRVLTEIGVSKTRAKTVATILSKRVLLRTIDMCKVFKLLILEKANKK

SEQ ID NO: 864 - protein, 1126 aa, synthetic construct
MTATPVKPWTRTQGPQGGNPPTKLRIPWPVVRRKCPECSVILRSLGMARWHVKTQHPGRELVVKCRRCGFLSGLRQEMVGHSCGGATSPQKSSRTRTAARALGAVGNPLATPVRGYITGSMSSPKTVRSPTPKSSRAWTSNDLQVLGDLVKRCGRSRVTARMAKLVLPGKTEYQIRGKLRSLYAAAMRAGSDDSEGEPDPEVMALSTPPGPVSAVRGCGRRLRWLARQMVAAMPDRGNPFTKALAVASRGAVVTKRQIRRATARAVEELSAIRASVVKHKNVGRLLVTPRPRPFSRRWVRREKFSRVRRLLETDPAKLVKWLLDGMEDTVCSIQLPKLRKVFGERWADAGASYVGLGQFEASGGADNSVFDKLFTPGEVVELRSRILTGSSPGPDGVSKLELLRWDPCGTKLSLLFNSWLVAGYIPRCVKPARTVLLPKSKDAKVLAGPGGWRPITIGSMLLRLYSKLLNERLSRAMPINLRQRGFIRAPGCTENLCILQSLVKKNYTDKGTLAVVFIDVAKAFDSVAHPHLIDALRQRGLDSHIIECVRQMYEGNLTRIELRGSFSEPIAMKRGVRQGDPLSPLLFNIALDPLLCTLEKKGDGIRVGAHNVTTLAFADDLVLLSSSWHGMKRNLDILAEFCKLSGLKVQGAKCSGFFLSPNPTSKTRALWCNHCVPWTIAGEGVSMLCGAETTRYLGMQVGPKGGIRSPDLMTLIRKWLEQVERAPMSPSQKLWITRTHVVPRLIYQAVQGNLSATRLRPVDRVIRNAVKRWLGLPQSTCNGLLYSRARDSGLGLQHLEKVVPALRAKTLFQLLQCDEEVVRELAWDRHGLYEFARRWRSAGGNDILRPLLPQEYTGLSDSDSSRDESAPMPVLKTAWRNPTDWRADAFADWTIRPVQGVGIAGFRGSPESNAWLSELSKRRLPYFPQCVRLRGNVCPTGEFRARGRVKTYAKCRICPRRLESTSHILGMCPVTRKARIARHNWICERLVSQAGALGWKVEREKTFHLSSGRSLRPDLILISRHTAHVVDVTVRFEGGYNTLQQAARDKVGKYRPIIPVLRKSLGVKTVKVWGFPVGARGLWYKGNTRCLMDLGSSRAKAKALGKKICKGVLIRSSKMIRDFLKQ

SEQ ID NO: 865 - protein, 1128 aa, synthetic construct
MAMYTPPGSSGGVSRLSLPLSADRSSEATLKGRLLFRRSHSPSHASEDPDSLPISPKRPRVGPLPRRTLFPSKKEKSGVLLFSWDKDWRKPQRLRGRLPPSVSVGLRAPWTGQACTLCKVLLPTLKAALLHFTKTHRPRKVLFVCLKCARTYRTAENLSRHTPKCVHKKVVSTGRLVPCLLCPARFSSRGISLHLRSKHPVEYFGGLRGPGQIKEPVTPVPKGKCFREQLERLSHGIPPVPEVHGMAEAITSHLSADPLGGGGIVTKKGARNLVIRLIKRLAGRKRVPIAPRKQRFSGNTFPKLRRRFRRVNEYRSIQRLWRTDFGAAARLILDGRVEASCDVPLQVIAKEYQNIWARSDAFLTLGQLASLPTVDNTGLNMPITSTEVVFVLKKANAGSAPGPDGLVRNALLRFDPSGRILALLYNRMISSGDLPALLKESRTTLIPKCSLGGGPPDVTQWRPITIGSVLLRTLSGILNRRLVAVSPPHGSQSGFVEGKSCSNNLLMLDSIISYAKHERKTLACVFIDLTRAFDSISHKHIDEVLARRGIDSMFRRFIHNSYSGCFTRIRATEGLTEPIKILVGVKQGDPLSPTLFNLALDPLLHVLEREGQGFLLGSRSISALAYADDLVLISDSQQGMLINLTLLEVFLHLSGLGVNPKKCRGFLLERCGTTMSLNDTPGWLIRGTPVPTLAPKETWLYLGVHISPMRGITKPLTLLILRKMLEKIAASKLKPSQKLTLLRGCAVPRLLYQADIGMVGVAELRESDRLIRKAVKEWLHLEPSTSNGLLYSTFADGGLNVPKLELQIPLMQLLRIKGFCGSVEQDLLQTWPMGALKKTLRTLWEHVQKYPAFKARFADTEVEDISKKEIRSCKWRSDDFNRWAALPLQGRGVECFRADKISNRWLANPQSFYMSQSDFVWALKLRTSTVSTCGRSSKLTKVDPLCRLCGEQVETLGHLIGCCHFLKPNRSRNHNNVCDFLARVATKMGWAVYRERHLRAPDRSIGVPDLITVKGSRALIIDVTIRLENDSSTLEEARAQKVRKYVKFSSSVIQSFKSVTFVRVFGFPLGARGKWHPRNSEVFTEWGLSKKATRVMAMSLSRLTIKQTISMLKLFNQTIKHPNSPSPC

SEQ ID NO: 866 - protein, 1331 aa, synthetic construct
MIVPLVFNGQDHPSGLSKWVPVRLGMGSTLRWRSCPACVFEVGHVWNWRINLPSGRWDQPLGELSRVPNGTGATASSPPLPVRKTISVAIQVQESDWPICPEVPSVVSESTAYAGSARSVESVEGARDPQPGEVDVASESTAYAGSARSVESVEGARDPQPRGVEVQERDWPILPEVPSVVSESTAYAGSARSEEPVEGAREPQPGEVVGAMYTLPEVVRADSPRVGADTLNEVRVLLPWLASDCPLCGVQVKGIVALGKHFAIRHAGVTAMYVCGKCGRSNISRHSISCHVPKCGGGVAAAGVEGEPASGFACDLCDARFPTPVGVSQHKRHAHAAAWNEVRLARRKVPGGEIRATKLWSVGEVQTLIQLIREHGDTVATYQLIAVELGNGKTAEQVRSKRRLLKIDMAGDCSNIAEEEDCSLSDPIPQAERSSPPSPQVLSSDRIREALVGWGDREGGEEVRAIASLVKDVDQNPFLIESSASELISKLGGGVERTGRARPPVREQNQARGWVRRLAQRRRAYRECQYWYSRDQARLAAQILDGAESQECALPPDQIYEAFRERWEGGGQFHGLGEFRTDLVSDNWEFYNPILAAEVRENLSKMSNGTAPGPDRISKKGLLDWDPRGEQLARLFTTWLVRGVIPRAFKECRTTLLPKSTDPGELQSVNGWRPVTIGSMVLRLFSRILSMRMARACPLNPRQKGFLASSSGCAENLLMLDEIIRRSREDGSPLAVVFVDFAKAFDSIAHEHILCALGERRVDTHVIELIRNSYVDCVTRVNCVAGYTQPIHINRGVKQGDPLSPLLFNLAMDPLIHRLELARFGLQWGDQGRISTLVFADDLVLVAGSVEAMNGSLGILEEFCQRTGLSVQPKKCHGFYMDKGVVNGCEAWRIGGAPIHMIPPGESVRYLGVQVGPGQGIVTPDLIPMVRSWVMRISEAPLKPSQRLRLTNTFVLPRLMYQADLGKVPATKLAQIDGLVRKAVKQWLHLPPSAGNGLLYSRVRDGGLGVLRLERLIPSIQVRRLYQMSRSPDLWTRTLTKRAVMQLDWEKLWIKAGGDAGSVPVMGTGEANPPDAGSPPVYPDWRRGENLAWAALEVQGVGVDQFRGDTISNSWIADPSAVGFRQRHWIAGLAVRTGVYPTKEFLARGRDKSGAACRRCLARLESCSHILGQCAWVQGSRIRRHNKVCELLATEAERYGWTVTREFRVDGPEGGLRIPDLVCKKADTVFVIDVTIRYELDGDTLARAASEKVARYLPVAAEIARRIGGRCAEVRGFPVGARGKWPSSNNTVLMELGIPVGRRRAFARLVSRRTLLYSLDVLRDFLREPEG

SEQ ID NO: 867 - protein, 1362 aa, synthetic construct
MSGNGKVGQDHRSALSKSVTTRLESGSGAVWRSRPTGGFETGSPVYWRISLPSGRWDQRTVERVIPRRSVGVNTDTLLPGPTLKPGNIVCKSSSVGTQTSAADVGRPYPGLAPACRQDNRSQLLIVSMTFVNSRLRESEYIEISQQPARTTGEVTDVAGSSMGQEGPEVGDGLEGVLPGLGPEGPVPGQPNQARLAVPVMTATDTLAPRVSTPQSASTESHGSPQRGERVGQSPDRGEGANDQIRMAVTSPGADEVDEEIMLRSAACEEGPLEVLMPRPDLICQLCGVHAGSVGMLGKHFASRHAAVKVVYKCRKCGRINTNSHSIACHVPKCRGMGGGGVATQGEFACLLCPARFGTGVGLTQHRRHAHPEDLNRERLAAVGVKSRLRPTKLWSMEELERLITLSRRHSHDPNVNVIIARELDTGKTAEQVRSKRRLLVSELAGDDPDTAAMERIVDPIDELANPVVLQSPPNSVRNELRRALDTGGDEISQNEIRVIAESLREVDQNPGLIESSASELITLLGRGGRAPCRRNGEDTVNGRVQKGWERRLSQKRRDYRVHQRLYVDDPARLAALVLDGSQGAECGIPIEQVYEAFLDRWEAEPTFRGMGGFRSVGTADNGEFAFPILACEVRENLGGMKSGAAPGPDRISKQALLDWDPKGEQLARLYTTWMMHGVIPRAFKECRTRLLPKSADAGELSDVSGWRPVTIGSLVLRLFSRILATRLARACPLNPRQRGFLASSGGCADNLVVLSGIMGRARRSGAPLAVVFVDFAKAFDSISHEHILCALRQRQVDLHVIELIRNSYVECVTRVGSAGQSTPPINMKVGVKQGDPLSPLLFNLALDPLIQALQDLGGGFEWGDQSVAALAFADDLVLVSGSDAGMRRSLKIVDSFCQLTGLRVQPRKCSGFYLDKGVVNGCEPWTMGGSALPMVGPGESVRYLGVEIGPLRGIVTPDLIPKLQEWIVRIKRAPLKPSQRVRVLNSFAVPRLIYQADHCEVPVAALAKLDLTIRRAVKSWLHLAPSTTDGLLYSRNRDGGLGVVCLQRMVKSIQAKRVYRLAQSDDSLTRAVTLDTISQSDWTRRWRLAGGPENEVPPPLGGSESLSLPDWRQEVSRAWASLQVQGVGASLFRGDKASNSWFTDPARVGFRERHFIAALALRAGTYPTREFLARGRNKAGAACRRCGARLESCSHILGQCPSVKGSRVRRHHKICELLSVEAERAGWSVTREFRLRTPGDGGAPGELRIPDLVCTKAGQALVLDVTVRYEMDDSTLARANEEKIAHYGPVATQIGEMVGVGNVRVFGFPVGARGKWPAFNNRVLQLLGLSVGRRAQFAKLVSRRALLYSLDILRDFLSEPTW

SEQ ID NO: 868 - protein, 1268 aa, synthetic construct
MLVREEMNGQDHPSGVSKWVSTGLEEGLMAVWQSFLTLGFVVGFEVSERSNLPSGRWDEPAGVTREVPRKGLEIKNNLPKLYMDKKSRTAQTQTSAEDWCTMSVWRAPTAEDPQVIVEAMTVVNSYIGYGDAEYLPPTRPVVSEKSPLDEILEAYAVRPKEKHQPQLTSEEVDQGEHIVTPDPACITITLPSPKLECPVCGVETSGIMMFGKHCANRHAGTQVLYACRECGRTNANGHSIACHVPKCRGIVENVREEGEFACELCKKGFESKVGLTQHKRHNHPVELNRERCAARGGGTGGIRGTKLWKAEEVKTLIRLERKYEGGPMANILIAEELGSGKTDEQVRNKRRLLLAERARHGLDCEQGEQEPPETTITPLPVPDSVHNQLRAALVGRDGMENESEVRAMAEFVRDVDQNPDLIQSSASDLISRLGEHRAPRRGGGGGEQRRAMKGWERRLSLKKRDYRVHQQLYLRDQAKLATLILDGEDEVECTLPIEEVHGAFRERWRGKGLFHGLGKFKSSSKARNEEFYMPILSAEVRENLAKMKNGSAPGPDGIRKQALLDWDPRGEQLARLFTAWMVLGVIPKEFKACRTRLLPKSRNAMELKSTDGWRPVTIGSMVLRLFSRILTMRLSRACPLNPRQRGFLASSSGCAENLVILNGIIKRSRLTGDKLAVIFVDFAKAFDSIAHEHIQCALEQRHLDQHVIELIKNSYVDCVTRVGSAGIKTPTIDMQIGVKQGDPMSPLLFNLAMDPLIQRLETKGDGLSWEDRKITTLAFADDLVLVSGSDRGMRRNLKILGSFCQWTGLKIQPKKCHGFYLEKGVVNDCKTWKIGEEPIHMIGPGETVRYLGVEVGPCHGIKIPDLIPKIQEWIGRIKKAPLKPSQRVKVLNSFALPRLLYQADLGGVPATTLAIIDGMVRNAVKTWLHLPPSTCNGLLYSRNRDGGLGVPRLERAIPKIQIQRAGKMASSEDEWTSRMTMSTVTREVWCRMWRQVGVGREEVPEWTLESNVSGGSPVIPDWRQAENMAWQKLQVQGVGADQFAGDRLSNSWLYEPMKVGFRQRHYVAALALRAGVYPTREFLTRGRPKQHATCRRCHAKLETCSHILGQCPAVQGSRIRRHHKICDLLAIEAERVGWETTREVRVVSPEGVIRIPDLVCVKAGKILALDVTIRYEYESGTLMAAAEEKVVHYTPIKEQLSGLMGGGTVKVMGFPVGARGKWPSCSTAVLIELGLTAARRARFAKLISRRVLLYSLDVLRDFLREAVR

SEQ ID NO: 869 - protein, 1354 aa, synthetic construct
MAKRVAFLCGRTDHLSHYLIINGNGMTTSRIFGQDHRSALSKSVTAGLEVGSGAVWRSCLTPGLEIGQRVYWRINLPSGRWDQPTGERVVSKRSVGVNTMAPVGGRWQPLGAAVRKTSSVGTQTATSDLVRLNLRRIGEYEGVLPQVIVESMTFVNSFIEVERARVVLTSQPVNAEGVVTEGAGTEDSRGEPDPGGAQRSGDTLADQGAQVIPTDVATSAPMGDPHEGGNREGADDQVGFTETTPVAESEEEQSTPRRRNIDTDVFLEVLLPDPDPVCSLCGVHIGTVGRFGKHFAGRHAAVKVMYKCRRCGRSNQNSHSISCHVPKCAGRGERVAQGEFACDLCQARFQTAVGLTQHRRHAHPAEWNREKVAAAGTSGKFKGTKLWSVAELEILVELSRRHSDDPNVNKIIATALGNGKTAEQVRSKRRNMATELARNGSHEAAQNGITDPILALAAPVVSQPPPHLVHTELRMALGEGGGEESDNEVRAIADLLREVDQDPGLIESTASDLIRRLGRGGGAQGQRRGEGTGRVLKGWERRLSQKRRDYRVHQRMFTSDPARLAALVLDGSQGTECAIPISLIHETFRDRWEGEVAFGGLGGFQSRYTADNGEFAYPILAAEVKENLNKMKNTSAPGPDRISKQALLNWDPRGEQLARLYTTWLVHGVIPDVFKECRTRLLPKSGDAGELGEVSGWRPITIGSLVLRLFSRILTMRLARACPLNPRQRGFLASSGGCADNLMILNGMIRHARGSGASLAVVFVDFAKAFDSISHEHILCALEQRQLDRHVIELIRNSYVNCVTRVGSAGEFTPPINMKVGVKQGDPMSPLLFNLALDPLIQALDDLGGGFGWDDHTIAALAFADDLVLVSGSDAGMRRSLRIVESFCQLTGLKVQPRKCHGFYIDKGVVNGCDPWVMGGTPIHQVGPGESVRYLGVDVDPGRGIVTPDLIPKLQEWIVRIKKAPLKPSQRVRVLNSFAVPRLLYQADHCEVPVATLAAMDLTIRGAVKAWLHLAPSTTNGLLYSRNRDGGMGIVRLERMVPTLQARRIYRLSQSEDAWTRRVTERTVAPVEWQRKWRLAGGSIDEIPRLGREEGTDARGSSLSLPDWRQDENRAWAALRVQGVGAAQFRGDKVSNSWLSDPAKVGFRQRHFIAALALRAGTYPTREFSTRGRNKEGATCRRCGARLESCSHILGQCPFVKGSRVRRHHKICDLLAIEAERTGWSVAREFRLTTPEGELRIPDLVCTKGSLVLVLDVTIRYEMNSETLAQAYTEKVVHYAPCARQIGAMVGGSEVHVHGFPVGARGKWFAPNDRVLSELGLAAGRRAFFARLISRRALLYSLDVLRDFLCGSVW

SEQ ID NO: 870 - protein, 1219 aa, synthetic construct
MIKCKSDMDRNSKTILAGGSPRIKSRLRDARGQASSNRARPPCGSVAEDRRSDGGHPGSEPLLVPGLRECSVVLTRLHERDVGAERPPGVMCSDTEPFGARGSAEETPSSGHPDASQGGGPAVANPTPEEPHVVVLLPIENYTCALCGVSAGTLMWVVNHFATRHGGVLVRYSCRLCGKASTGWRTIVCHTPHCNGGIGRRQRSGAFACEECGRGFVSNRARSTHERHVHPDLRNRKRSRQVPAASGGSSAFTQTEVEAGVLRALGEGVDPKRPRLIEETDSPMLDAADPPVAQQTLILPDGGLSVGLREVARQMVGGAEDGEEGYVRVLSAWLEGDDEVPALVESLASEILLRLRDVAVQQLPAVRTGRSLGGTAGPRWQTTGKARRLAYHACQLKYTRDQTRLAAELLDGTCTSDCPLTTEEVYGEYCGIWEGVTAFGGLGPFVPFGLASNGHMAGPISAEEVKRCLNQAANATAPGPDRIGKQNILAWDPGCEKLSHMFNVWWITGVIPKCFKQCRTVLIPKTSDQSALGEIGNWRPITIGSTVLRLFSRVLTKRLVDTCPLHPRQRGFRTSPGCSENLEVLRSLFEHCKGERSQFAVVFVDFARAFDSVSHEHFLCVLRGMQVDPHVVELIRGSYQDCVTRVEIGDRQTPEIDMRVGVKQGDPMSPLLFNLAMDPLIHGLERLGKGLSVSGTKVTTLAFADDLVLVSDSWQGMAHNLGILEAFCDKTGLKVKPSKSNGFLLSPTRDSFTVNNCPPWVLGGSPLRMVQAAETVGYLGVRVSPWKGIVQPTLYEDLLRWCENINRAMLKPSQKVVMLNKFAIPRLLYRADHCDVKSGTLHLLDRTIRERVKAWLHLPPSTCDGLLYARNRDGGLGICKLARLVPSIQARRIFRLSNSTDGVTRSLLDSDLAKSKFKGSWLRAGGKIEHLPQLGSEGQNTESAERGEAAGPMMPQCAAPLDWRHDEFLKWAGLNTQGVGILSFYNSKVSNSWLAKPKGFKERHYIAGLQLRANVYPTREFRLRGRGMVGASCRACPHRLESCSHILGQCPATHRSRIVRHNKLCLLLATEAEGLGWEVRREWAFRTPSGELRRLDLVLIRDSLVLVIDVTVRFEYAPDSLTRAAAEKIGYYGPHKSTIARELHAREVRVFGFPLGARGLWFPGNWEVLTAMGVGETRRKYFAALLCRRALLYSLDVLRDFNRLAGLGQGGQRGRRRWR

SEQ ID NO: 871 - protein, 1163 aa, synthetic construct
MLKRNGERRDLDDQADSTPHKIPRKGSAKRTLFPRQHEGNHVFFLSWEKGWRKEMGSSNKLPHSVQVGLRFPWNPTACPICHCLLSTGTTAIAHMRRTHRPRKLRLYCARCSLQFGRHSQISTHVPKCGERAKATRAGSTDFACDHCPTAFASRSGLANHKRVKHTETYLKELNSTARDPKKGRAIWSHEDVDYLGVLLAKSGGASEALLEAQGHLTQYSRRQIASKCRQLLKTQAESKLALTQGTVGVEYDRAAMERPLSPLPPTRMVKTLLDASLASEGADGLIVPKTVDPKVIDAYLREVITQLAGHRKLFKTKSKTATRRIRRRATKRTEKAANYRRLQRMYMKDKRATAKYILDGASTSACPVNPRTVEQAFKQVWQSKDLFRGLGQFGLLPSSDNSVLCGPISPAEVLRTVKSIKRNSAPGPDGVRKTHLLKWDPTGKKLASLFNAILYCGKLPKCLKGSRTVLLPKTSSEKDQLDIGNWRPITIGPIILRAFSGVLNKRLTEACPVHPCQRGFIDTPGCSENLALLEGIMRLSRLEKAQLGVVFIDVAKAFDSVSHKHIQEVLERKGVDEQFRLLIQDSYKGCHTVVQTKVGVTGRIRLRRGVKQGDPLSPLLFNLAIDPLLHALEKFGIGFEFQGAKVTSLAFADDLVLLSNSWAGMAKNLTILEHFCDVTGLRVNPKKCHSFMIKRNGSKQYSVNGCEQWTLSGIPLRLIGEHEAERYLGVMINPRKGIVKPPLRDTVKGMLENLSVKGLKPFQRLELLKIYALPRVIYVADHGNAGTAELAACDRDIRTRVKAWLHLEPSTADGLLYARPKDGGLGVLKLSVHIPAVQLKRLLKLFNSEVQNIRTIARAATPDRALERLWNRSQGIITSKQDAGTFTPSRIDESKLAAKVWRATEHQRWSRLPSQGVGVTVFENDNISNAWLRDLSRNGFTTAETILALKLRTSTVPTRANEMKGRSPRTNEVVCRLCGTDKETVAHIMGRCRTLKRNRMSRHNKVCDLLKGESELKGWSVVQEKKLTLDTGEVGRPDLIMVKGKTALVLDVAIPWEVTGDTLADAERGKSDKYKKFVRTVLELYPGVERVRVSGFPVGARGKWHKRNDGILQEIGLSKTRIGSFSRLLCRRALLQSVDMCKTFRGLVAPKGARGAGLRGNLA

SEQ ID NO: 872 - protein, 1027 aa, synthetic construct
MMSNRTLSGTDQIPCTDPDCHQLFNTVRGRNIHFTKKHGKGRSSNSITNFENDDQCTPNAGPSQHNRMLCTVSNCNKSCSGTVGLTSHFRQAHPVLHINQIANKYDSPAPNTTSECEESTPVDSPRSTTRKNENEQIQEIMANYENDLQVLLSESINTDKLDGITDKLFVEFRNIIKLLPGPQHPASKFYEARKKKQQFQSDHRTFSTTTNPQRKSKRERQRRKEQYNYDLCQFLYYNQRKKLVQRIINTQGYEPCKIPTADLYDSFKSRWCVKNSKVLHQYETVEPEEQKTLDEDFLDRFSEEDVKAAMKNMNIDTSPGPDHIYMRTLKLVKCEKVIALLATIMLQWSYVPKIMKEAKTILIYKGGDKSDPGNWRPISIQSIIRRIIERILDRHLRKFITFNNNQRGFTKHFGTLINTNILDGCLKHAKSSETDITIVLLDIIKAYDNIGHDHLKNCLLSAKLPSVLRNLIINLIDDNFTRIQACGSQSKPISFLRGVLQGSPLSPSLFNLSIDFILRQLSETELSEKYGFQLTPELPNLSVTGFADDTCVIGNSKGSAIELTSMAKHLFNSIGLDISAKKCIAITLIEGELLEDTLQIDNETTIRSIRNNESVRYLGVPFTDEIIFDEKKVICNLKNDLNTLSSSAVLRPDQKLNILNQFICPKLTYPFQMAPFAKIKKDFLEDVDIIFRSTIKTIIGLPNDTPNSMLYSPRRYKGLGLLRANWECYIQIINSCVHLKKESNPHINFTRCLDTDIEKCRIALKLEDNCSAFSGNEKTLGQRIRNHLRNKEFDIWCNLKQKGIGVILYKECPKSNNWVFSKFGLSCSEWTNAIKMSCNTLAVRSIPGRSTDGPLCRHGCKESETLGHVLGSCPKNSLLINARHHKVRNLIAEALRVKKFEVLEEVTCVALNGSTRRVDILCFNPVTRKGWIFDPTVRFENHEGQALEVDQEKKAIYEPCIPYLLSNYNLLHLDVIGLFIGSRGTIPKFFDEFRKSMNLPHSLTEDISLTVIRSSLHIHHNHTYNPI

SEQ ID NO: 873 - protein, 1002 aa, synthetic construct
MTNRARRNGIPIMASTSTAHIPEAPDPRNLNQTDGQVGCQYCGKFYKGKRGLGIHIAKQHQEIHRDQISQQYQAPPAEIIADNPDLNPQYIDQDDQQSQESQILRDRIQSFEERFEEMANEELNPEKFEQCYKDLVLFLSDADGTLPGPKHPSSKFYHARKRRNKNYTTNDRKFAESSNPERASKRDRQKRNEQFQYDLMQYNYYHRRKKCVNQLMSSDKNPQCQIPMKDIQMAFQERWGTPNEKMRSEYGPEVDSIKQAEIDAEFNFVIPSQAAERAIRGINNDTAAGVDKITIRTIKNLKCEKILASITTIMIRHGYVPTEFKQARTTLTPKKGDLLRTENWRPISICSILRRVVERILDRVIKRYISISEHQRGFTNLPGTHINTALIAACLQKAKVKKMDISVVLLDIIKAFDMIGYNHLEQTIKHTSLPTMMKTLVMDLQTDNYTQIHVNSDTTQKIQLRKGLLQGAPLSPTLFNLSVDYIMRELTENEIAHQFGFPLVPTLVPLSAAGFADDTALIGNSGNSAVQLAAMAKQLFKDTGLEINPRKSAVIHIVKGKQVVSDLKIDDNDEIPGLKIGEVIKYLGVSFQGEMIFDQEAVINSLNNDLKQLVTSALLKPEQKLGILNQYLWPKVIYPFQTAPVGKIPQSFLEDMDKITRSSIREILGMPGDIPNSMLYSPAKYKGLALVRAKWEAPIQVHNICQTLQQAGNDHLMEVRDFEKEMEECRNKLGVTEEEYEEMRSSDADESETPKKISAKFRATLREREFDDWCALPQKGKGVALFKQEPSFNKWLMTKKGLSSSEWTSSIKMTANVAAVRVIPGRSTQTTRCRHCNEIETLGHVLGACEKGTLLRNARHHRIRKMIADGFRKTGLQVFEEVHCVSDTGSTRRLDIIAINTNKKSALVLDPTIRMETGVDQPESVNTEKKGIYDPCIPYLKDKYKLRSVEVIGLFIGSRGTITTFLHEFVKQHKLGKSLLDEIVISVLKSSAHILHNHLYSQ

SEQ ID NO: 874 - protein, 1116 aa, synthetic construct
MLLSIPLFRGLRLVGLTSRLVGRLNLKFVPKQTRLASEVQPTCPARSVDLTLNNGASALTLQSVAGGDNSANTAEGRNSAPFACDIDGCDRSFGTARGLGQHKSKAHREQRDQQLGALRGENLGRSVWGAEHLLLLAREELEFCRRDPGAQQKAINEYMSSTVFNGQRTVEAIRGQRRSQRYKALLAQIQAESEPPVVEVVPPPVVHEPVEAGPTLGQVASESFHRVLVEFRDKESPIAGFIPGEKGSAFVGVNMCQDDLNRGWENWVSNAQRAAGIERRVKRANKTSTSRPSGVDRETSALNVRSNPRVGTPNRTQRRKRWRAEVQSRFERDPGTTTKDILGGNSITALCDPGTLAEHWKKVFSSESVVDPRRPKPPVAGCMWSLWAPITLNELKGALAGTKHNTPGSDQLGKRELLRLEQSDLLAWFNLWLFSGRLPSQLTRADVTLIPKCDMAAAPAQYRPIAVCSKILRLFHSILSKRFRTVALPEEQRGFRPQDGTFESTWLLKTILDSARQKPKATFVAFVDISNAFGSVSHDTLLKACVHIGLPPPLIRYVETLYSQFTVKIKGGTGDEVKVGCGILQGDPLSSDLFNFAMAFICQELDRKVGYSMEKRVAGTDSLLSYASYADDTFLIAETREGLRMLAGQLEGSLWKAGLTINASKSATLAIDVAGTKTKTWYCSPQPFIDLGGRRVPALSVSGTYKYLGVNAGARGFDNSSIKPYLVTRLERLQRASLKPQQRLYAVRQHLIPALYHGLILGGSKAGALKDLDCLIRKRIRSWLHLPHDVPMGVFYASIGQGGLGLPCLATKIPTLRSLRMERLQKTDQENLKKVVESETGQKLATKDLTRPRLDVADHRVSAKIAENQHWSGKLHGSVDGRGLNQHGRVPAAHAWMRDPSLRISGGEFIRALHTRLACLKTPLRAARRGNTSAMCRSCADSVCSLGHILQVCPRTHGLRVKRHNDLVKMLVTALKRQNYEVIEEPHFRLERSFCKPDIVAIKRGQVLVLDPTIVADGFPFCEAMTTKERLYGNDEVLQQVQLMYKERFGSVPAGETPPRVIVSGVAVNWRGGWDFQSWAVLTKTARIPPRYLILASIRVLCSGWSAWAATMRRTN

SEQ ID NO: 875 - protein, 997 aa, synthetic construct
MAKLNEAQRKRAKRAETRDETKPRKGVWTDEEIEQLHVLCKKFEGERFINKLIEVELVTKTNRQISDRRRTEAKKALTDFATKAPEANPGRTEATKALTRPATKAPRDTANPRARKRGKTEPTPPSVATDTIDGSLFIEWLTDKELSRDNPERCEAINILTEAIGGTDVTDQVENLMKKLTEIWTVDDRINKKPKGKPTKARARSIKGASEYRRVQELFKRDKKRLATEILDGKVDNSCPVEVDEIESTYRERFGGISQGVDLSDFPAPLRTADNSETLKPFTEGEVRRALLKMRRNTACGPDGITVGALRVSRHLLTITTMLNVFLLTGKVSKLIQGNRSILLPKGGDPSDLGNWRPLTISSVVLRLFTKLLASRLENAIYLNPRQRGFISDGGSGCADNVQCLDHLIHHAKTEGKTIAVALLDLAKAFDTVSHKHICSGLKRLGVTGHFIGLVEELYDGAQTYFKTPKGITGMLPMTRGVKQGDPLSPILFNVAMDPLFCLIDAEGSSYDLEGTTVSMLAYADDAATVAGSREGLQRNAELAVEFTKTTGMKLNVKKCCAFVIKPLAKRTYAVNDCSPIQLDGTDVPWLTPGKCTKYLGGKVDPWKGFVTPQPLKKLVTWCKRIHKAALKPRQKLSILTQYAITRVMFSLGLNIPSKGSLEELDTLIRKWSRRWLHLNESVNNYMLYARPRDGGLGLPKLAKEVPVAHINNLLSCISSKDDTIRRVAESANFEVKIEETRDLFSLPSWKAARVSNTGWRKQEARAWAALQSQGKGAELWYDDAVSNTWLSPRSFLREREVLTAIALRTNTVPTREALGRADKGRDVRCRRCGSAVETLGHITGACMFVKRNRIKRHNHVCFAIRRSCTRRGWAVLEEPRIVVDHQTFKPDLIVWRDNTAHIIDPTVVWDDSLKSLQTAAEDKHRKYQGIRDAVGKLTSCTEVICHQGFVIGARGTWYKGNNSICEAVGIDAQSRKYICQIVLCGTIKLLGAFMNL

SEQ ID NO: 876 - protein, 1126 aa, synthetic construct
MLRQRGDAGLDAPVPGVAVAEDACNGPHGGERIYMPGVVTNSGTVESVGEGDSSKMVVPMPFGVLACPCRQAFCSVYEFELHMDRAHVDVDLRYRCDICSKTCFRAHGAKIHRSKCRGQKTISRTDLPWGCNVCAMAFRTKSGLSQHKRHRHPAIRNLERKADCKSVVEGEVTVLTVKPTKLWSLDEVERLRELDVKHHGKRSINLLIAAELVGKSNKQVSEKRRALFGSRAKSVGKKSVSVPAKRKTEECLARSVERVPEQAFWQFVENSKNSIEGLRHKEALQTLVDLLQDGDVVRSMSGVSQLLADITPVTKPQLRKGGKSKKKVSLKVRRRSKTKAEQYRHQQQLFTSNKKKLLAEILEGVENSRCPLSVESVEETFRSRFEEGSSKVDMSHVPRPLNSMDCGNILKPFVPSDVMKVYSKTRRDTASGPDGICLKAIQRWDPRGVKLAAVFNIFLMSGKVPESLKSNRSILLHKGGETDEIGNWRPLTIGCMVLRMYTKILAERFQEATPINPCQRGFVRGGGCDDNIHLVEGLVRDAKKRGKPISVCFLDLAKAFDTISHDHVIAGLVRFGASEHVTRIVQDLYQFSKTRFTIPDGTTGEITINRGVKQGDPLSPVLFNIAMDPLFCLVEKSGVPYRLEDGTAVSVAGYADDTLVVSGNRDDLQVNVDLVSEFCRAAKLKLNARKSYAYTIRPVAKTFLVNCGDQLRISSEVVSWIEPGVPAKYLGARMDPWVRSVRDDPNEDLRSWCVKIGKAALKGRQKFILLTQHLLPRLRHRLAYGNPGKVTLCELDVTTRLYCRKWLHLPECISSAFLHTRQGDGGVGLPCFEKEVPMNRVKSLYRMLSSKDSRLLSIAHAIGMGEVLEDHCRRWAIDYPIVSVSKLVRRVKRSMRSGWESLGSQGLKGSFWKSCSASNGWMSREVLSEREHTVALQLRSNTYPSREAICRGRPGSNVACRRCGLSVETLGHISGRCMAVKRSRIKRHNKICGILVSSTHGSKWEVMIEPHIKSEGKTYIPDLVFLRGSEAVVVDPTVVWESKVTSLSHAASVKVAKYLPIVDALKELTGCSSVSVYGFPIGARGTWYKGNNRVLDVLGVHRSKAKFFCLTALCDTIKLLRVFTDR

SEQ ID NO: 877 - protein, 1382 aa, synthetic construct
MESWGTLTLEGQQWYRNGDPISTGDLDYYLTDYAVPSSSQRDGDTGSDTESDSEEDDRPQTEADGLSGDEHGIILELPSATQQCPKCSVVLNTLRTLQEHLGATHGIRDVLFRCRLCKNIFDRVHRLECHAPRCKKGTRTPSGAGLKYICDGCACRFPTKSGKSQHERHRHPEIANNRRIKATELIAKQKREKRHAAKRLKRQAAESEQEELLAAKERARLQANREREAILVGEKPGEANETRVLRTEWDEVATEIFLDIYCEMGDEKGLHTRVRAALQVAGYDIPLKRISERKRTKGFRFALLDKQEQNRKEEEVAPDQAGEAARSTTKAYPSGQQADHNVECMDTVTAETLLLSLERESEARILQTKWDTAAIKILMDYYCITGDTKGLHTRVRAALRVAGYDISQKRISERKRTKGFQKSLLERQKRSGIEQEVAPEQTGEAARSTPKAYTSGQKTTHATECLDSSTVETLLLSLETSGDEPEARIAALCRTVQKTGTEGEAAEVAYAAHEQLLNDFIAPGPMAPTKGAKMPRYRKETKVRKIRTKTLKGKAKERVERYRNLQQKWKRNKKNAVKQVLDGASDAKCQIDAEVIEATYADRFESAGPRVDLSNYPGPFSEPVLPKIATETGSDHEKQSGQNRQSEPCPKRLLEAVSASEVRKAVRAMRTGSASGPDRITVAQLKKKTEENPGFLAGVYTLWMMTSKVPEKLKTSRSLLLPKGTTDLQNIGNWRPLSISSVIMRLYTKILAKRLTKAVSLHPSQRGFIPAPGVEQNSVLLEHLIRKQKKEKGTLAVAFLDLAKAFDTISHDLFAKGLQRLGVPSQFIRVVEDLYDGATTSFTTKNGETRQIEINQGVKQGDPLSPILFNVCLDPMFCSLERDGKGWGSDKTSITALGYADDTAVLSDSRAGLEKNLALVKAFCDQVGLRLNVNKSYVFHIKSDGRTFTVNDTAPYEIDGGRIPWVSPDNATRYLGKMFGPWGGMSIPNMKQQIEEWARSVAAAPLKPMQALEIWRDTILPRIKARILHSRPSAALLKSLDIQIRGHVKTLLHLPEQISNAMIYAKTRNGGLGIACLEDDIPDLTIRGLHKLCWKAKSDTIRRHAQNLGVRDTLEDLCTRYPQCKPAEPGNKKREEEDPQRDRAIPRSKWCEYLASQKTQGMGSTTWMKYKECNAWIRAGTFSNGETIDAILLRANCIPTRECIGRYTQSTDTICRRCGMTTETSGHISGWCPSVKRSRILRHNSLCKILGNKALKQGWTVHWEPILNGPKGKLKPDLIFVKDEVAVVVDPTVIWESDAECLVKAAQVKVAKYSYLETQIKDRFEVTEVQVFGLPIGARGGWTPGNDQVLRALGIPVGQTRRALSVRALGGTITLISLFFDQ

SEQ ID NO: 878 - protein, 985 aa, synthetic construct
MIGLSQLWAAFSSTAAVDTPQRIMRVCHGPLAVIDPGGDDELRRLASAEIEFGKPVNINQRLHDVFEHRTVQAISTIRKSARYRCILAKVVEDRQGAEVESDRQNEARASDSDDSLSLAIENLMKRVAELESDSSSTVRAVLAYARKSLADGDADSGIELLPPEICSPVAPRRRTCVRGTQKSRNTLAPTPPAASRRRTRVQREPQNRDQRRRQHYKLVQNLYKSNKRLAAGVILDDQPVRPVYPPIEKIDEVFRGRFSRPSPPDNADFTVCPGEEMSMSYLTPAEIQAARSSMKKDNAPGPDRNATMDTVLSLELPALEILFNVWFVLGQVPVVYKKARTILLPKSGDLSDPNNWRPITICSIFGRLYAKLLANRLSHCAALCERQKAFLPVDGCGENTVILSAVLANAHKARRPTHLAFLDLAKAFDTVPHTSIIRALRRRCLPEHFIKIVANLYTNATTSISTGLESTEELPIRSGVKQGCPLSPMLFNLVLDELIRGIGTNNGIALGDSKVAIMAFADDLILLSGSADGLQANLQVCEKFFADRSMAINARKSMSLSIVRAHGRKTMMTDEGCQWTVGGERLAAIRHTDDIKYLGVQYTAIGRSVAKFPKLEEWLRRLKAAPLKPQQRVDFVRSTISSRLIHLLRLCRVTAKMLNALDRRIRTFVKGVLHLPPGTSTDFFYLPIEKGGLGLREFRSLIPAAKLKLIGSMKGSSDPVVVEAVGHEHWLREERWCERMVSLTGMKDETLRRRVERYISSHTGQTQSGFTLLPGQSRWLERGRGLSGREYVVGCHLMSNTLPVRTRTFYGGPDRITTCRYCHNVPETTSHALQSCPKVRDAVTKRHNTILSMLRRFLTPNHDAVIREPWFRGPAGNMNPDLVVKQGRMVYVVDLTVPYDSSIGFMDGQASRKVDKYAVLVDLIKEKYQAERVEILGLAIGARGLLTQRGWSVTQKLGLSHKQTSCLAMTALKQTCGIWGLFQDR

SEQ ID NO: 879 - protein, 1094 aa, synthetic construct
MESNTSRELGTLPPGDGRVGLGATALTVMTRTEVDHETATRPPGGRPAAEVPRAAETTNVCPNQACKRWFRTPAGLTLHRRKCQPDTLAAERLSQQPRRRNWTLEEKALIRARAFELRKADGSLPCTTLARLLIERGDSDRPIESLKRLIMAFDRDGLLAPDQTIPRETREILNESAERPLVADPLEATGTLSDATMPTDSQGPTALDDREVDVESPVAAWQRRSLETLMTWQGEEKSVLPPGDLAALSEDAITIAFEEWLKGQGWSPPAAPPRRKKLTNPVSKPFSKRKARAAMVEKTRRWFDKQPHRTVKAIVKGTFGLTDPKPAAETVEFWAKSLSTPVEVDEVHLEPMAPANYALCNLIQRCEVVAAAKTLRAKTAPGPDGLTATKVKTLPAGQLAQWFSLFLFRGFVPRRLNDARVTLIPKVAEPAGPGDYRPIAVSSVLLRLFHKILDYRLQAIPLNNDQKGFKQCDGTRDHSFLLRSLIKHVRAEKESLMVCFIDVKNAFGAISHQAVIEAARAKGVPPPMLTYLQNLYANSFLDFGDGRASVKLGAGVRQGDPISGSLFNLAVDCVRRGLDPAVGFRVGTSNVQSLLFADDSVLFASTKPGLQIQIDRFADGLKRLGMSLNAKKCATLCIHRTSLNRSAAVHVDPLPCLGFGGEKFPALSSSDTYRYLGVKVGFGGTDTSFWSEELKTRLDRLNKSYLRPQEKMFGLREVVIPGMIHSLVLSEATKGLLRRLDTQIREMVRSWLHLPKDTPLGFLHARAVDGGLGVPSLTARIPRLRSERLIKLNRPGYSEAMTAVLETPTGSKLLDSATKLHGWPEKTRRKQVKQLICGKASEFEAAKQLLWNSVDGSGLKEIGSFSSGAGGKNESKWVTDPVRYRMSGGEYVRAILVRGGLLKTGERATRGVGREGQRTCRRCRQVQSLGHIINNCPMTHGLRVARHDRFVKCLKSALENRGWKVQIEPRVKLAKGSFVKPDIVAAKGDEVVVLDPSIVGAKVPVERAQCAKKNLYDRAEVKEHGFEFAMSCGFKPKSFDVAGVIISFRGVWSLISWTLLRRLGLPVRLLNFWVIRLLNDAYYTWASELLHRAG

SEQ ID NO: 880 - protein, 968 aa, synthetic construct
MASGSTDPGPASPGNRVVSGATFFSCQECCRVFDSLRGQSQHRRQAHPDSYYDAALAGIGGRKKARWDHEESSLMAREEKRLLALGVANINMELVKCVPGRTLEAIRGHRRSSAYKEIMANIDELANDSDTSVLDVPSSPARTVPAANNIDPNISPLLFSDDEPVSERAGTGAYLQADIMDPISPPLFGDASVRERTGTVGSQAAEHGIRRALLDATARDQEWLEMSHDDFLHFRSSVRADHTGDRLQVLVDTEYDTWHAKTFHNKRERGERSKKAQARGKPKAKPRSTADGDAEGEPVAMAKRYRRPSAVKRREQYARVQSQYNINRSRCAKSVLSGDWAKEPPSLPLSVQEGFWKPLMETPSKMDLRSPVAKFEVCHDVARPVLVKEVQEALKGMNDGSPGPDGIDRTTLRGVNAKGLATHMNFWLCCGCSPTAFRDGITTLIPKSAESQQPGEYRPITVTTIVARLFHRILAKRCERHVPLSPRQKAFRRGDGLCDNIWLLRSTLQDRTRSRKPIWVTFIDVAKAFDSVSHQSMLIAARRVGVPDIVLGYVSSLYRDTVTRLKVGKTLGERIHVLRGVRQGDPLSPLLFNYVMDWILDELDPSLGISLGAGREMSLNHLAFADDVSLLAGTRRGALHLAGQFERGLGKVGLSPNAKKSATLAVVVDGKAKRWYVDHTSFLRLNGQVIPSMQITEVYKYLGTSAGIRVEQPAVKARLEKGIEHLSRAPLKPQQRMFILRVHLLPSLYHQLVLDRVTDGMLGWLDRIVRKAVRGWLRLPHDVPTGIFHSRIADGGLGLPMLVTKMRVLRKNRIAGLFRRASEGSDPVLKWYSENSATLGAEKDRWATVKYKTEVVTTTRQVDDKLARELYQTIDGGGLSQHSKVPYIHSWVGDGSRLLSGKRYIGAIQVRCNTLYTRGRAGRGRQNRDVRCETCGDYESLGHVLQTCARTWNHRNKRHDYVVDKVCE

SEQ ID NO: 881 - protein, 1211 aa, synthetic construct
MVAKLISTRMPNKERSRDPPASGSVVLPADKSVESAPATGRQTRTAKSGSAVQLTCGNPPAGNERTKSNAASTSNPPSTDGGAVRFPSTQHREHEMDVVNVPFVCEGNTTHRCIQGQCVEEFLEFKLLAKHLQQAHRWSSTRIEAIQFVCRLCQAPWPKLASATSHHRYCKMAMGKAHAGGHGRPVRDNTVTASDFACAVDGCKFFAKNAAGLKVHKARLHPTVRNAELAMPTGRSLPWEAEEIRLLAMHELSENSARGWIGRFVSSRKLNRTTDAIRSFIRTNAYREVRDLLREEGTGPTRALAPEVNTPEVAPSEPPISVESTRSISRSRLLEQLRNLLDEEEVSECVRVYTRTAITRKDPGCGFESMLGKLIPVAETARRVTQPTQSPLPKNRKERKKAEYRSLQRLWKQDRAQLAQVVLDDMPTNVQEPPLNLVEEAFVDRFEKTSPEDVEPFEPNACDDPQGLVDFIGVTEVRLHQKKLKLRSAPGLDTWITAERLKAVSACDLAALFNTWLYLESVPQPLKAARTKLLPKSKENLGDIGQWRPITIGSQLLRLYCKILASRLQKRAHVHPMQSACQPHDGVGYNTNLLNEIMRDARTRRKSVFIVWLDIAKCFDNISHKTIERALSRFGTPQHFKNVLSDLYAGASTVIRTAHGETRPISIRSGVKQGCPLSPILFNMIVDELFRKLGSDWGYELGDHKVAAVGFADDTILVSGSQMGASKLLDETCRFFGARHLNINPKKSLGFGMVHPPKAKGKTMKILTGSLWNVAGTPIPMMGVEESTRYLGVQFGARGRKNADLTELRVWLERVKRSNLRVAQKFYLIKTNVLPRVRWRLVNGNANKMTVRRADALVREMVKQLLHLPVGTADDFLTLRVTDGGLGLSRLADSVTKGKLKLAYRLQSADDPIFRSVAERNLSSHDTRRCLRDFQLGAIDRPSDINKAAERQYMDRKEAFGNTSQGRCHQHLANNGNPWLHFDRGSLRANDFIDACKLLTEQLPTRSVVCRKAPELDQRCRGCLKEKETQKHVLQCCPITKHATMSRHNRIADYIANMVVEHGRGFRVLREPGIRKKISLTEEKLHKPDLVCISEDDEPGESKIVVIDVAVRYEDAPHVMDMVAEEKHRKYVGLTETLRTLFERPHAEVIIGSIVVGVKGALWLGNQRFLNHLFGAERKMINAEISRLAVLGSVKVWHAFIEETIGRWKRK

SEQ ID NO: 882 - protein, 1130 aa, synthetic construct
MDGRKGLTRPLFQLVLDEILQTAAVQKTPEGAISEPGPSKPLPRANVLNTNLNMMSSNNENVPEAAAEGRYSGVAVGAATVGTSTVTPCVRCPEFNQLCKSQRGLALHRRRAHGKVPAPQALTKRRWTDTELYQLALEEIRLRDNLPAGLGLNQALQQKFPNRTVGSIKAQRRTALPRYQQALQDAERFMARRQGAPSVLSLEQVSRESEGMGIDLPEVSTELTAGDSAVGGETSQSVEAEPANVQLGEDPERRAWRSRLEESISASGIHLPGQCVEAILDPQKSKAEVRELVSAAYDAWIPARESRPRAAPGTRSNRGIGRPKPTKRALRRQNFARLQRLFKRSRKRAAAAVLDNSWESLADDLPGVSLTDQEEFWKPLFEAPSQPDPRQPDCHEVNWDLAKPVSSEEVRRVIYGPKGMKDGAPGPDGLKLRDLKRFETDKIAVHFNLWMLAGSPPDRLSEAVTILIPKELGATEPAKHRPITISSIVLRCFHSVMARRMTDGLPWAPCQRAFVPGDGVAESTLLIQQILSRARKKLKATHLAFVDIRKAFDSVSHETMLKAARRMGVPDPFLEYLGAYYERATTRLKVRGTLGVLIRLGRGVRQGCPLSGLLFNAVVDWVLSNLDPNLGMPLEAGPVGDDTRRIRCIGAAFADDLTLCGETKEGLQAQCDNLTAQFRAAGLEISAGPNGKTTSLSIEVDGKAKRWSCVSEPWLQVNGDVVPTIPLDGVQKYLGIQFSAYGCRVDVVKELEEGLENIRKAPLCPQQKLYVLTQHLIASLSHQLVLAPASAKYLEHLDRLVRKAVRGWLRMPKDTPLEAFYARTMDGGIGIPLLAKRIPILRSKRFTKMSESQTKDPVFAFLLRGYQPPPPPKFNGVAVADMRTLNEAVAENLTDRVDGRGLRPAPYVKAQHDWVNSATELVKGRSFISCLKLRLGVVSTPERNSRGRPEMDSRCDCCGRTCGVSHILQSCPRTDGSRRARHDRLKGRLAHAARKRGWTVLSEQTIPVPDAHSKRPDLILAKNGHPVYVVDVTVVSDRWEDLESAYRHKCNYYNTEVVRSFVSSRFPGAQVKHQAVAMSWRGLIHPESARLCCEALGLSKRWLSIFSLVVLEKGTSILVHWSRSTYRVTH

SEQ ID NO: 883 - protein, 958 aa, synthetic construct
MRQIHADEYNSLQLSRPRPSRMKWTLLEDAQVQIIANELWPQCATRKQLYQEVSKSIPKSTQESVRQRLLHLKWVPLSKDTEEVQPVPISCDATPISPPHPIAAPISLSSPRHSQTSGQISSVSDVMEYDDGKAALRSSALRQIESSKSTTPGRHELHVIIEQLISQPTHSSNVKAQIDEFIQRQFPHTWQPSKRRSHGQVPSMTKKQVRRAQYAQIQTLYHHRPKDAARCVLDGKWRTAFSAHAEEMPGFNDYWSGIITAPRVVDTRVSREVIPTNTDLINPISDDEVTRALNDMKGTSAGLDRLTAISLLKFGSSYWAALFNTLLSLAYLPPHLSASRLTFVPKCDDPSEPSHYRPIAVTSMITRALHKILAGRWSRLFPHDRLQFGFLQRDGAFEATSLLHAILRHAHSSSDPLAFAVLDLTKAFDNISHDSIIRSAQAFGAPPTLTSYLRSCYSSSMVCLNDRFLHPERGVRQGDPLSPLLFIMSLDEALASLPRCGINAAGTAIQTCAYADDLLLFAPSKDELLVTLEHLADNLELAGLSINSGKSKIGNILASKHPYFVALDQDPLAFRGEVIPPLLPSEEFKYLGVPFNWKGKAIQKLQEELVQMLQEISAAPLKPFQRMDLLRRFLLPRLTHSLTLGTVHKKTLRAMDRKVRASIRRWLRLPADTPVAFFHADINDGGLGVQNLSVSTILNRRLRLERFLSSSIPELHWAVRDPASLPSLKLANEQARVGEIAVESIAEAKSAWRTILLQSHDGAGLVDATRSPVSSWWLRNPGRIFPRLYIRGIQLRAGILNTKVRRSRGGRAADNVNCRGNCGHHESLPHILQRCSVTHDARCSRHNEVCRLVQTKLPTQKLTVLDEPRIPLNTTYCKPDLMLIKKNVATVIGVQICGEAQMETSFKRKISKYSQPTIQNAIESFNHISNPTLQSVFHVPIILNLRGIMHPKSAAFLN

SEQ ID NO: 884 - protein, 1246 aa, synthetic construct
MRSKPTLTGNSTLMMIQNTDNAPCLFSGDHQRFEVAARGVSCTTPVSAAVTNRRRVRMSPDVVSIVSPNMKRQRPAHIVDLDDVSLERELNTEEEETRKEAAGSLAAEGVSPKEAQAIVDNEQLVALASQSARNERPVDVHVCFCGAAFRSARGLGQHNRHRHPLELNETRKKLLPFRKRVWEKYEDSALIRLANEIAQSNTTKRDLSYQLTAHFLGRSAEAILSRLKVLKWSNDRKQPSSIRRNLMQPGEVHSLVQSEHDTETHGPPQQPPVQIQSPVDVPPTSTVTGSQEVSCNGASRSEAFQQLSREQVSSCPSIEPAIFNAICESSTVLDWPTRGPRGDGADNEIITDHALGSAISSWPHNISTPTHSDREPEYSNWFDSFIAGVASRLREIIEDQKPQSIEPLRGQELLTVAENLLSGSLSLKRARKQLSKHASICFPHLWKPTDKSKYLRSKTLTSNRAIKRANYAAVQALYAMNRKDAAKMVLKGDWKEAYKGRGAEPRGCHAYWSEVFRSPGVRDCRPVHKISSTLWSLMEPLTTAEVTNTLASMGDKAAGLDRITLAKVKGFSRMLLTEYLNLLLVTEAAPVQLTKARITMVPKIAKPSEPADLRPIAVSSVLHRLLNKALSCRWSKSLNFNSYQVGFQPRDGCFEATLLLQTIIRTAHQTNTSLASAFVDVSKAFDTVSYDTVLRAAAAYGAPSPLVNYLRSQQNSSFVTLDGRKEVRCKRGVRQGDPLSPILFVMAMEEVLSASKPEIRFEKKDLKVHALAYADDLVVFAGNETELREKLVELERALAMAGMQINVKKSRGLTIKANKKLKHSVLMDTEYKLLNDNIPPVGTADTLKYLGLSFNWKGRVPVKHTGKLDSILTEVSQAPLKPQQRVEILRDFVVPKLLYELVLGDAHRNTLKRMDIMIRTRLRAWLRFPKDAAIAYFYVPTSEGGLGIMRLGTSVPLMAKQRLQKMLNVDNNITSVLRGTGEFRMQLRHAGRPIRVESEIVTTKVESHKAELSCLKRKLDGRDLAVPDVDPVSHLWVRYPQNVFPRLYIRSLQLRAGVLRTKVRGSRGRVQVPGTMMNCRGGCGQPESLTHILQRCQVTHDGRCARHNRVAEAVAKKAKASVEETWVEPIIPVPGSFRKPDLVFRQGNVLRVMDCAITTGERLEVMWREKVDKYSTEDCKTGIQQTLGSNYQVVHCPIILSYRGLIYRKSAAALRQLGLTSWDISDLCLLAIRGSLKEYDVYMRGT

SEQ ID NO: 885 - protein, 1073 aa, synthetic construct
MAKREAQLMKAGAVNFNFELTRLMAGRTLESVKGQRRSEAYRGLVREYASLESSSDEVPLRMGCRVDSGAVAERLPSPVPRGFIPSTSALAGLPGLVPDTNGGEAPLRMGCHVDSGEATERLPTPVPRGFIPSTSALTSGVTPHPEEADTIATCATEEEDVWERLTSAVEQAGPSYHLNGAEFRTFLDLCCSRKEGNLGHCQALQDLIDQEYNSWVSDKYRSVPVGSRSKSWGKKIHSKTVSEEHSTAATAQSGRTSGAGVRDRRPPGRSSRVRARRYRRVQCLYGKNRSECGREVLSGNWREERAGLKLHQQQQFWSELFSAQSVHDDRSSETVFRREFSLMAPFSRFEIEKSVSGQGSGSPGIDGITRETLKSADAGDLAGHCNLWLLAGCPPSGFRQGYTVLVPKVARPQVAADHRPITISSILARAFHRCVAGRFEKTLPLGIRQKAFRTGDGLRDNVWTLRGILRERTRRCRSLCVAFIDVAKAFDSVSHESIVQSAIRIGVPAPLADYVRSLYAGGKTQLKIDNELGPAIAVGRGVRQGDPLSPLLFNFVMDRALSKLDPRLGVRLSDDVTINHLAFADDVVLLAETAGGLRELARLFEAELALVGLRPNPKKSATLQILVDGKRKKWVNGTRTILKLGDDPVAALTVEEAYRYLGTSVTLGIKRQVSSEVRLEQGLTQLSKAPLKPQQRMFILRTQLIPSLYHELSLGDRVTYGVLGRLDRSVRRAVRGWLRLPHDTPTSLFYASEVDGGLSLEELRVTVPILRRNRLDRLIGLADSSADPVIRWLVNSTSTLTKDRKRWDTVQTRGVTVGDAKQARIANGVALHDTVDGRGLRNMPDVPCVARWRTDGSSLLTGRNFIGAVQLTSATLTTRLRASRGRPDASTSCDCCGRVESLGHILQVCERTHGPRIARHNRLVELVSSKAAKLGWTVVHEPHIRTPAGIRIPDLVVYKSGESASVLDVSVVSDTADLHAEHEHKVSKYDLPEIRSYVANLSGVPTAEVGFSSVCLTWRGSLGRPSSCFLTQLGIDQRSQMLLSVRCVEEGFQIYLSFQRSTFRPALARRRVP

SEQ ID NO: 886 - protein, 1157 aa, synthetic construct
MSGNQGSASNGSPVKGFPCPDCTLVAKSKGALASHRRWKHPVPPSVSSDELEGAVGGVPVLTPQTDGQNQGQNPVSGASGLVIGSTATGTVKGFACPNCPRSFDKSSGLSLHRRKAHASIFHAEFVPPVLTKARWCTTELTLVAREEIRLSRIAGKRATVAAIAACFPDRTFDSLKSLRRNPEYQRILSEVEERLIDDPCRTGPEDGSSQSLVSPPNVTTQARESDVGVRTPGPLSPATMTNSLADSLLSGEGASVCSAPCEQMNTLLIVLKANRQKFHLDDHSMDSLASDLATGLRSSNPALLQSLIDTEYDGWLTYLDKTYGPFKKPTLSKPGGRWIPPKIDSNCRSSKKLERRRQYREVQRLFKKNRSRCADLVLSGDWSKEPVEIPFEEQESFWGPLFETQSLPDRRRPDPISPPILELVDPISATEYSDSLKSLKDGSPGVDGMDRAYLRGIDAEDCIAHFQLWLATRTPPLAFKAGITSLIPKSADSNSPGQFRPITVSAIISRLFHRILASRLESLVPLSPRQKAFRRGDGLQDNVMILRSLIKDRCNKNRPVSLAFIDVAKAFDSVSHESLILAAERVGVPSILLDYCRNLYCGGTTSLKYGRSQSSRVISARRGVRQGDPLSPILFNFLMDWVLSALDDNLGLAINDNTRVCHLAFADDLVLLSESVDGLRTLARDFEIGLSNVGLLPNAKKSATMRILVSGKRKKWVIDPKPFLSLGGVEVPTIGIDGYYKYLGLSMTAGKPHARASDRLLDHLSQLDRAPLKPQQRMYFLKVHVLPGLNHLLVLDPVTVSQLQRLDIAVRRHVRKWLRLPHDSPNSFIHASVSDGGLGVSSLRTNIPLLKRDRIDRLISRVSTGLDPVLEAVYKTSRFLNDEIRRWSQPRSFTGRLIATKEDARNVQASSLHTSVDGRGLRFHNLVPSSNDWLTNTTSVQSGNSFIHCVQMRAASLHCAVRAARGRPGASMKCDACGELEGLSHIVQRCCRTARPRDGRHDSVVQFLAKKLLGPCEVLVEPTIPTPSGIKRPDLVVFVPGQWAKVIDVSIVSDDIHPDIAHQRKADYYSREPAVVAWVAFRTDCLVSSIDFAGAIWNWRGALSPASATVLADIGIRKSDLNILTIRVLEQGFKCWRTFKDCTWLGGRRRRRRALSG

SEQ ID NO: 887 - protein, 1125 aa, synthetic construct
MNNHQKTCQKQRALTQQAVQIPLAVLPTAQSQPAIQEFICDQMYCAKSFPTKMGLTQHTRLMHFAVYNDALPDPTANRQVWTTQDLEKLARLRANLVPGIGPTDQARLLYPSFPGKSAEQIRAVMYTKQFRDITLDPDPTTPAIDRLEPIRPLPDQTAHSQSENTRRVDPGASTLRQVRVETVERRREESPQCPTAQSQAGSTCRVDPGASLSRIEQLALPAAIPAREPVRELVVDFGLVNSPTIVDKDPATVIRELLQELITIDHAHPLIAAANRYTRRALESNDTNTGFDEFIDAIFPPKVDFEPKLLPPTRPPPTNNHQRRIAEYKRCSRLFKKNPKRLVNQLIDGAPVTYTLPLRADVERVYLERFSVSRPDETPAEPTKQCADPDGQVSPIDIDEIRREIKTTRRNTASGPDGQVNAKRLRLIPLAVFHRIFNLWLLMQSVPQSIKPCRTTLIPKTADNLDDVNNWRPITIGSILNRLYAKVLDQRIKPDMHWTQKGFMPVDGCGEHISVLTALINQSRKNKTPLCLVFLDLAKAFDTVPHDAIRRALIRHSVHPMMAAVISDLYDNAATLIACREGNTREIPIKRGVKQGCPLSPKLFNMVMDELLSSLPDQYGVEFAGEKICNLAFADDIVLISPSVPNMARMLGLVNTFGEAHGLQLNPRKCQALRLAPVEKNKKIKIMSDTIPQWSVNNVDIPMIKADGIVKYLGAHLSPRGSMRLQVSEITDWLEKVSKARLKPQQKLILLRSYLLPRLIYRLTVSSETSSNKAHELDRKVRKTVRKFLHLPSNLHLSFFHLPVTMGGLGIPALVDVVPLQKMKFINRNIASASDATRAAIAHEFWEKQKRKIMRWLHIPLWLNQKEVKTHRLSQHHERLAALINSTQGYGYEQIGTNPHKNDWLHGYKYLRPDDFINACKLMSCTLPTRVNLYRGQPNANKQCRRCHQKPETQNHVLATCPPMARAITARHNWVCGQLAKELRANDYQVIEEPLIQIPSGDRLKPDLVVVKDNHIDIVDVQIPYENRTDNVSTSYEYKMHKYEPLLETAKLKYGAQSARVRPVIIGARGTWCARQDSTFLSWSMTSKFRRKLSLGALIGTLRVWKLFLSGLDTRPRYTNIEKVI

SEQ ID NO: 888 - protein, 1053 aa, synthetic construct
MFPCVCGTNFADERGLETHLRRDRCRGPPTENDRVCPECGRRFDTFAGMRQHHRKAHRDQHDRQLELRYEGEAGPAREWSEEDTLRMARAEAAFTGKHINQHLQGIFPGRTVDALKYRRRKQEYKDLVEQLKNEVNQAQPGEAPLLVDPGDPPELNPFPPQQDGDPIPPDRGLHMAQNMNIIHPIWEANDPLAIAIRDFLNSAQNLTEEDLALATLLDVRDLRRGDARIAETIETYLTHIKNSCTPIGRRNRPNNIRTRTAPMRNENPNRTGRRVGQYKTYQNMFREDRARLAEVILDGVTLEEADKFPDITEVETSYRDIFDRVGPDDDAPFEAVDHRVRLDSIFTAEEVDLAFNTNKSDAAGPDGIKPSWLKKLPRHKLICLFNIILLTGYVPPEWKLNRTILIPKAGDPVEVGNWRPITISSALQRIMNKILAKRMALLPLHQNQRGFRRFDGVLANTLTLQAIIKECRAKLKPHSVLTLDLRKAFDTVSHASILRSMRRFCVSERLILLVEEGYRDTCTTVSVGGNTTGPIRVRRGVRQGDPLSPILFNLVLDELIHSLENLGSGVRMGTGTSVSCLGYADDMLILSNSIRGAQNLLGEAADFFSARGMALNHDKCTASTTSINRGNKHIYAVSRSAFSVEGVPIRQMVPSDQYKYLGRRYDLLGQTKPTLDELDGQINNIIRSPLKPQQKLVIIKSYLIPRYLDKLQSPVVTLKLLKTFDRKLRVATRRILRLNRTSQDAFLHAPVREGGVGLLCLRDYIPLILKNRMWRLGDGRDQLQTEIMNVDWIRSLSERILRWCGEKTSGSRIKIAWSDALQNGYSGNGLQQGRCHIGSGSWINRPPPFWSGADFSRAMQLRGNLLPTKGIPSNPPEERKCRAGCQRVETLCHVLQKCPMAHFCRVRRHDHLVDCLAKNLQKKGFEVETEPRIRSQDGRLRKPDIVCAKGDRVLVVELGVSWEGPDPLSVAWHNKRALYEDPGFLAALSLRYPGKLVSVTPVIVGARGTWCASNRLFVEATGYTKQEVAQVCERTLLGGIIIHRNFMKQMGPH

SEQ ID NO: 889 - protein, 1129 aa, synthetic construct
MRAKISRATQLRGLPSLETMGIMIGVNNEGISVNGSASNSNRMTAEAPDQEVGANTNQGGAGGNDFVCDVEDCTRSFGSQRGLSQHKRLAHPVQYNASINISRKKNVWSNEETRMMAMDEARATLKEENKRLFMNQYLINIYPNRSIESIKGKRKSPVYKELVMECINEIRSETGNSTSGGSAEVSRNHLDRGIGSTDLRMAYEEDRRPGSLSETNASDIVSSGRENAGHVRLQVAANSGPAVPEQPDDQPRGEESEESVDELVMGRNNSSRIIKDAINELIRTLDTTRKTMNRKLIETVEKVLNGTDNGNSLTNWIMKWLAARPSKRVSMREKEPSRAISRKERLRMEYAHLQKLMKKNFRTAARLVLTGTKPMQCTLPAQEVRDFWKSVFEVDASEEQRNNETRPVWKRNGKLSSLWTPVTTQEIRNAELDFNSASGPDRVTVAAWRAVDVDARALIMNVFLLKQDLEQRLKNARTVLIPKVDQPTSPGELRPISITSVVVRQLHKILAKRFNKIYNFDERQRAFINCDGTLENLMLLSAILTDARRRKKELHIASLDLRKAFDSVPHHVIIDTITALGCPKPYITYVERLYQGAKTLLQYDNKGYTLSIERGVLQGDPMSPLLFNAVMDRALQGVPDEIGYELNGKRLNCLCYADDVIFIASTKLGLQRTLNIVAHKFGKLGLEVNIRKSNTLSMIPSGKQKLLKTITEPSFSINGGFLDAIGVLDVWKYLGVRFVGSKVEGAKVSCAQELKNITRARLKPQQRLRILKSALIPKYLHALVLGRVGWKQLDELDKQFRDATRGWLKMPKDVPLAYFYASCGSGGLGMPNLKQMIPLIRLNRIKNLELRWGENVGFLKNSFFYKERTEWCMGALRTLGTEPSKRSAKRYWDDELLRKVDTNDLYVCKESKASNKWIQNTSDLSGQEHVFFHHVRAGCLPSRARTARGRQSDRSCRAGCRVSETNYHVIQQCHRTHGGRILRHDKVVDMLCEQLRQNRFNVLKEPKFRTEEGLRKPDLLATKDGKTTLIDVQVVSGRNMARDHAAKRSKYSSVQGLEEKIKTRVNSREVDYEACTITYKGAIGRDTDKLLNKLRIPEQVKYRIVKSVLRGAWLNWKRFNSLTTTRGRR

SEQ ID NO: 890 - protein, 1017 aa, synthetic construct
MKPFKCDHCEQSWTTQIGKSQHMRKAHAEQYHQSKSEQPILRRNWTAEEIHLLATDYLELEASGYPGDKPKELIRLGKSTRPYDSLRKMIQDERFRSALETARRQQRPQTPPPPPPEDPSSPSTSTSSSRRSSTSSSTSTSTSTSAPPSPPRSASPRSQPPEWSLAIKAVFSAALLASVSIDDLVPGAADLNQQYVDDDFQRWLPRLPEPKKKTWAPSPLPAGKRQRRRALYARVQQLYRKNRVRCADSVLAGTWDAEDHCLPLETQEPFWRNLFETASLPDQRLPEPVREVQWDLLKPITEAEVTSCLSSMDAKTSPGLDMYTLSKIKQLPPQQLVDRLNLWLYCSTVPSSLNEGFTSLIPKVPAPAEPALHRPITVSSILSRLYNKLLSRRFDRLCPAGVRQKAFRQGDGIAENTEILKNVIKTAKSKTRNVWIAFLDVRKAFDSVSHESLILAATRAGCPSPLLEYIKTIYANGRTRLKVGGKLSEPISVAQGVKQGDPLSCILFNLVVDWALDALDSNIGFKLGEQLLSHLAFADDVVLMSETQAGLQRQIDAFSGHLAKSGLLMNAAKCATLNITALPAQKSWVCNQTSSLRLGGVLIPALSVNETYKYLGLQVSATGVSPKVEEKLKEHLKQLTRAPLKPQQRLWILRIKVIPALYHQLVLGDPTRGYLKYLDNTIRHAVRRWTRLPHDLPIPAFYADPTDGGLGLDSMVLRVPTMKAKRLQNLVMSADPVVREVAKLDSFQREMRKWSRPVEFRGLLAATKPTRRAALAYHLHDSVDGRGLRHASLVPSAHEWVTSGTSLLDGHKFNAALGVRFNCLPTALRAARGRPNASSSCDCCGPGQLESLSHQLQSCPRTHGSRVKRHDRIVDQARRILSRLKYEVIVEPHIQTSDGLRKPDLVAHAPGKPTMVLDATVVSDMYDDPNEPHQGKVDKYNTEEIREKVTQLTGAEPGFSSICISWRGVFAPASAADLRDMGFTQADLGLLSAITVEQGATVHRIFYQSTMRTGRPL

SEQ ID NO: 891 - protein, 1234 aa, synthetic construct
MVQSMALRYISTATQTDPLDLRVKKADIPSTPQESSDEGFNLVCLEFVNTSYRREVGFHLETIWEGLAELPEPYEILPLGLAQEDESECVQRVIEEPITPEALLRPSEDRTPPRTPVVSVPGKNPACPRCATRFTRLLGLIDPLKRNHGQKKIWFKCSKCGKQNLKYHSIACHFPRCKGEVCVAPTGDWVCEVCQRGFTTKIGLGQHKRLMHPLVRNLERIEASHPKVSSLRGAHKKVWTEEEEALLRQLVVTYAGRKNINQLIMEHIPSKTAKQISDKRRLLMKVPSKKVPSIEEGGEEGKEDLPQDAGRTKEGQLKLHYYDAIKERLAVYGFASCQEAFEKILEGQDPQMVVNEVYGKFFGSPSGPSVFGTSTRGRKAQRPQGQKASKVTTSWMRKRAEKKGKYLRFQKLFHLHRGRLARIILDNSEAVQCQIPSGIVHAAFKAKWETSVDFMGLESFPPHGEADNTVFRALITEREIGKNVNEMGKTSAPGPDGITLGHLIKKDPKFSLLMEIFNLWLVAGTIPDLLRDCRTVLIPKSSDLGRLGDINNWRPITIASTALWTFSRIVRPRLTRACPINPRQRGFIRASGCSENLKLLQLIVRHAKRERCELGVVFVDIAKAFDTVSHQHILTGLTQRGVDPHVIHLVIELYKNVSTYIGIKSEKTDPINILSGVKQGDPMSPILFNLALDPLLCKLEKNGYGFQRGNLKITAMAFADDLVLLSDSWDGMCGNIRILETFCELTGLKTQGEKCHGFYIKPTRDSYTINDCPAWTINGSPLNMIDPGNSEKYLGIRIDPWTGFADSGLAEKLEEWLHRIGDAPLKPLQKVDILRTYTISRLVYQADHTELRSGPLESLDLNIRNAVKGWLHLPPSTCDAIMYSSCKDGGLGIIKLSVLVPSIQARRLHRLAQSSDEALVTFLKGEHLEILYEKLWIRAGGEKESIPAIWEPIPVEECVASGGEGVSEWEAPVPKVRYPRPCNWRRVEFDKWKHLVAQGHGIENFENDNISNGWLIRYRGIPHRKLITALQLRANVYPTREFLARGRKDDCVRSCRHCAADYETTAHIIGNCPITQEARIKRHNSICEILSGEAKKVDWTVFQEPHIRDEYNELFKPDLIFVKGSKAFVVDVTVRFEHSSSSLKDAAAEKAKKYQCLLPQIKDLTNAAEVEFVGFPIGARGKWYAKNSELLSALGLSKTRLGKTARALASRALFASVDIVHIFVSKARSIVPPE

SEQ ID NO: 892 - protein, 1264 aa, synthetic construct
MVLTIPSNYCDEMGRPLRVNYISVATQTSPLDLRDPVAGRATVCRGGAVEEGMNLSGLEFTNSRLYGFEGIDSSTWQERLSRLPEVYESLTSLRVGGVSDSPPRIEESEGEGEASPPGALAQPTLLTSPPILGTYPDLPTEGTPVVKVPDKNPSCPCCGNRIGKMSGLIEHLKRVHGKKNALFQCAKCGKTNVKHHSIACHYPKCKGVETSPPVGGWACEECGRTFETKIGLGQHKRSAHPAVRNIERIAASRPKECSARGVHRQCWTEEEVELLRRLDKQYEGSKNINKLIAEHIPSKSAKQISDKRRGLHKSPVKRREKDQEKQKYLESEGLHLPGIESRVDGGLRSHYRKVISDWVTSDKLTVLRGMFEEVIEGEKDLSTLVDEATQDRCACLFFKSHELKAVQGGRPKVTRRVPSSEPPKVWMKKRAKKRGHFLRFQRLFYLDRGKLAGIILDNVESLRCGIPLDEVHAVFKSRWEMSGTFKGLGAFVTEGQADNSAFQAMITAKEISKNINEMNKNAAPGPDGLSLRDLIKTDPHYTQLMELFNLWLATGVIPDVVKECRTVLISKSALPERQKDINNWRPITIGSIILRLFSRILTVRLSKACPINTRQRGFIKSSGCAENLKLLQLLIRSAKREHRPLGVVFVDLAKAFDTVSHEHIIMALRQKGVDDHIVSLITNMYLNVNTRIHLKNDQTDPIRICIGVKQGDPMSPILFNLSIDPLLCKLESEGSGFQHYAKKVTSMAFADDLVLLSGSWEGMKDNITILEAFCELTGLKTQGEKCHGFFIQPTKDSYTINDCPHWTINGTPINMIEPGSSEKYLGVRVDPWIGISKPELLEKLQGWLHQIHSSPLKPMQKVDILKGYMLPRLFYLADQTDVKATYLETLDLAIRSAVKEWLHLPPSTCDALLYSSTKDGGLGITRLLGLIPSVQVRRLHRIAQSSDEITREVARNEGIEKEFQKLWVTAGGDKNKIPSIWDPKTVMVISKELGGEEPASEWEVPAPKTIFPRPCDWRRQEFINWTKLLSQGRGISNFEKDKISNNWIEHYRGIPHRKIITALQLRANVYPTREFLARGRKDQQSTSCRHCGADNETCAHIIGYCPAVQDARIKRRNYLGELLISEAKKEWVVFQEPLLRDNNNELYKPDLVFVKGDQALVVDITVRYESKPTSLADAAAEKVKKYQHLLNQVQELTNATRIKFMGFPLGARGKWHQGNYELLADLGLSSSRREKVARRLSNRALLTSVDIIHIFASKSRTVTS

SEQ ID NO: 893 - protein, 1270 aa, synthetic construct
MSRSVYPHPKLVKMGRPMRIAFVSVATQTGPMDLREKVTTELGKEHDKDDVPENSWNWDGLEFINSIADGLEWSHPSNWAERLAMFPEVYETYNSLCAAEKENDRTGELTSQMAMSPPRTPSPDPNADLPNRGTPVVKVPDKNTSCPCCGNRIGKISQLVEHLKRVHGNKKILFQCAKCGRTEMKHHSIACHFPKCKGSVTTDPECKGSITTDPTVGFTCEECGRVFTSKIGLGQHKRLAHPVLRNIERIAAAHPKASTKRGLHRQCWTEEEVELLRILDKQYEGCKNINKLIAEHIPSKTTKQISDKRRGLGKSPEEEREKDQDLEWRKLMTKEQEHPRGTGSSTEEGPMSQYKNRIMEWITSEKLPILQGVFEKVLNGEENIDCLIEEAVDEYYPHLFRRSAELETSQDQKRPRPSKANPPGPSTEWMKKRAKKRGQFLRFQRLFYRDRGKLAGIILDDVESLQCGIPLEEVHEVFKSRWETPGTFKGLGAFRSAGQADNSAFKAMITAKEIAKNIREMNKKAAPGPDGLSLRDLIKIDPHYTQVMELFNLWLLSGNIPDVARECRTVLISKSALPERQKDINNWRPITIGSTALRLFSRILTARLTKACPINPRQRGFIKSPGCAENLKLLQLLIRSAKKEHRPLGVVFVDLAKAFDTVSHSHILTVLKQKGVDEHIIKLIKNLYHNINTRIDLKNKQSEPIGMQIGVKQGDPMSPILFNLSVDPLLCKLEEEGSGVQYGSKNITTMAFADDLVLLSESWEGMKKNIEILEVFCELTGLKTQGEKCHGFFIQPTKDSYTINNCPPWTVNGTPLNMIEPGSSEKYLGLRIDPWTGISKPELLQKVKGWLQRINDAALKPFQKVDILKGYTIPRLIYLADQADVKTTYLETLDLEIRTAVKEWLHLPSCTCDAILYSSTRDGGLGITRLTGLIPSVQARRLHRIAQSSDETTREIAKKEGIEKEYARLWIAAGGNKEKIPPIWDPTTVRVISEGQGGEKQVSEWELPAPKTIFPKPCDWRNQEFTNWTKLISQGRGISNFESDKISNSWLEFHRGIPHRKLLTALQLRANVYPTREFLTRGQQGTLMRACRHCQAEAETCAHIIGYCPAVQDARIKRHNQICEMLMEEAKKKEWTVFQEPHIHDEHNELYKPDLVFVKENQAIVVDVTIRYESKSTSMADAAAEKVRKYQHLTDHIQDLTKASNIKFMGFPLGARGKWHPGNYELLKEPGLSSSRQDKVARRLSNRALFSSVDIIHIFASKTRTITRSA

SEQ ID NO: 894 - protein, 1039 aa, synthetic construct
MDHNNIKKGRQEGSCSPAGAISFSSGLLSQYPCKYCTKLFSSRQALNGHLRVHAELRRFLEPPSELVSTSGRMKWSAEETAYCVRAYRMLSHEECVPTEVHKKLLEWGYSRSYESVRKFLRTKKFADELERSTKTTVTHVVAEEVVSHDDNSAVNGASDLEGVLPTLRSLMESQVDKVGQLEQQINVVVESILAGETSKESLSELTSNLLENWAAKFAPKRKIRKLNKNLESCQKKMSSRARKAMMYKFDRQAWNKDRSRTANRILNGPVQGCKRPDEIPEFLPYWSKTFEKFESSGVNAVNMTLIRDSYQIWSGISLGEVKVAVSGMKSRTASGPDGISCEELKAQHPRVLCKLVNTFIYLGGVPSILKRSRVTFIPKKDNASSPRDYRPISVTSVILRLFNKILAKRVIDSAQFDHRQRAFRPVDGCAENVMAIEGVLNDARKMHRSVYMASLDMSNAYSSVSHEALLKALESNGACRGLLGYIEDLYSGFTTLLSDGGKEQSVQVERGVMQGDPSSPVLFNMVIDQLLNHIPEEGGYQIAEGVRMNGCAFADDLNIIAATPPGLRMALTEIEVNGRPWGLEFNEKKCSYLAVRAIRGKETVVETDHVFNINNKPIPATEATDIWKYLGAYFSADGLQDAPDMLSVWLERLKGAKFLKPQEKIYVLRVHIIPRLIHRLRMSNLSASKLNSMDRKIRAAINGTQGFAHLSSRTPIHFYYAPGKSGGLGLMRLRHSVPAMVLGRFGALKDSQDNVLKTIANLSANVLRCKKAESLLVQFGDVRSSGVELLVGRSRGQISEINRFSLVESTVSGRGLKHAGEVPQVHSWVTNGSTAFFTGREYCDALSLRLDALHCRVRACRINRTSNFTCRAGCPEAENNYHQIQRCIRSHGMRMRRHKTIVDALVKKLLQMGFEVRKEECFKTSEGNRFPDVVAVKNGKVFVIDPSIVGDTLDPNVWHDAKKNKYETCLKDILQAQYPDHDIFFGGLAITYKGVLASKSAQYLREVGLSNGFLKLVTMMTIRGSLLCHWATQASTIVK

SEQ ID NO: 895 - protein, 1048 aa, synthetic construct
MLEIYEQEKEGGRGIGPRLLKKWRNKYKDDNYDGKKLLCQVKKLTEREWLKPVKPQERRKEKRNKYRPPDPKGRTEDANDYEQKVMTWIEREPNPKEVVKRRKTVPYWIVNPAIEILGREIKSGKLDTLEKALDRLAHLRTLADDLANKEDKATKRTNDKRGYRNIIRDLYVKLTLVKKLHTKLVHERIEIELRKLFKLGSKKELTKKWKDTKILEIRNLITQTKKKAKNLKLFAKTSKIDPNKVVQKQNKTANPQELLKKSTEFWTEIWGKPQDSTSREIKQVLKPVGEIATGRPLKGIWKDFGEEEILKATKKKKNFSAPGPDGISNYWLKEAKHKLTPLIAKELDKWANEKPLNLTRYTEGRTVLIIKDNKQSPEDPGNYRPITCLNTIYKWITSILLARLNEECERRGIIDPNQRGAKKGTWGTVVNNRIDREVTKKYKKSIYQMWIDFKKAFDSISHKYLWKCIKKSIGKSTRRLWMNIVRNWKTKLEIDGEKSEFILFKRGIYQGDSLCPALFVLCLNPLSIMLSRSKGVQLDDGKVTHSLYIDDLKLYEMEYETIREQYRLTKKTGKIIGLVPNPAKCGICGPIKYKSVDHDVIPRVTTENNYKYLGIREDDGILIKETIVAAAKKFQTELTRIWRSKASSWNKVNATNVKANALVKYIMFNVDISWDLIERWATTQRVIIRAAAEIEKTTTNVAMHGPRCKGYLGIEDLECLYIKAKMAVVLHLAKNTTENKKHAIYDSIEKEARKALTKINVKLENGTLTYGGEGYPLVIKDKCKELLANAFWNKWTSERKEQKWTGKFDNKVGYKNLYWPMNRNLSQPLINDIIEMREDNKPHKANLLRRKLALDKFCRHCGYENENQEHIAVGCTKYLKYYTRRHNKVVKKIAYEIIVKGGSIKDYIGLNANNVQVRGRYKAGKGEILLEPVYWLEEENKYQKPDLIWVDHENKCVSILEVGITWDSRIGEKKREKANKYETILPILRKQYRGYKIKNEPIIIGALGTISDDLKEWLETKLKTEIVAKKLQLEVIRSTLEITKNFLN
